(19) United States
(12) Patent Application Publication
(10) Pub. No.: US 2026/0035697 A1
(43) Pub. Date: Feb. 5, 2026

(54) Compositions and Methods for Lactate Dehydrogenase (LDHA) Gene Editing

(71) Applicant: Intellia Therapeutics, Inc., Cambridge, MA (US)

(72) Inventors: Zachary William Dymek, Cambridge, MA (US); Shobu Odate, Arlington, MA (US); Anette Huebner, Somerville, MA (US); Srijani Sridhar, Cambridge, MA (US); Bradley Andrew Murray, Boston, MA (US); Walter Strapps, Dedham, MA (US)

(73) Assignee: Intellia Therapeutics, Inc., Cambridge, MA (US)

(21) Appl. No.: 19/210,426

(22) Filed: May 16, 2025

Related U.S. Application Data
(63) Continuation of application No. 17/212,901, filed on Mar. 25, 2021, now abandoned.
Application No. 17/212,901 is a continuation of application No. PCT/US2019/053423, filed on Sep. 27, 2019.
(60) Provisional application No. 62/738,956, filed on Sep. 28, 2018.
(60) Provisional application No. 62/834,334, filed on Apr. 15, 2019.
(60) Provisional application No. 62/841,740, filed on May 1, 2019.

(51) Int. Cl. C12N 15/113; A61P 13/02; C12N 9/22

(52) U.S. Cl. CPC C12N 15/113; A61P 13/02; C12N 9/22; C12N 2310/315; C12N 2310/321; C12N 2310/322; C12N 2310/531

(57) ABSTRACT

Compositions and methods for editing, e.g., introducing double-stranded breaks, within the LDHA gene are provided. Compositions and methods for treating subjects having hyperoxaluria are provided.

[0001] This application is a Continuation of U.S. patent application Ser. No. 17/212,901, filed Mar. 25, 2021, which is a Continuation application of International Application No. PCT/US2019/053423, filed Sep. 27, 2019, which claims the benefit of priority of U.S. Provisional Patent Application No. 62/738,956, filed Sep. 28, 2018, U.S. Provisional Patent Application No. 62/834,334, filed Apr. 15, 2019, and U.S. Provisional Patent Application No. 62/841,740, filed May 1, 2019, the contents of each of which are incorporated by reference for their entirety for all purposes.

### REFERENCE TO ELECTRONIC SEQUENCE LISTING

[0002] The application contains a Sequence Listing which has been submitted electronically in .XML format and is hereby incorporated by reference in its entirety. Said .XML copy, created on May 14, 2025, is named “01155-0025-01US.xml” and is 2,746,716 bytes in size. The sequence listing contained in this .XML file is part of the specification and is hereby incorporated by reference herein in its entirety.

[0003] Oxalate, normally eliminated in urine as waste by the kidneys, is elevated in subjects with hyperoxaluria. There are several types of hyperoxaluria, including primary hyperoxaluria, oxalosis, enteric hyperoxaluria, and hyperoxaluria related to eating high-oxalate foods. Excess oxalate can combine with calcium to form calcium oxalate in the kidney and other organs. Deposits of calcium oxalate can produce widespread deposition of calcium oxalate (nephrocalcinosis) or formation of kidney and bladder stones (urolithiasis) and lead to kidney damage. Common kidney complications in hyperoxaluria include blood in the urine (hematuria), urinary tract infections, kidney damage, and end-stage renal disease (ESRD). Over time, kidneys in patients with hyperoxaluria may begin to fail, and levels of oxalate may rise in the blood. Deposition of oxalate in tissues throughout the body, e.g., systemic oxalosis, may occur due to high blood levels of oxalate and can lead to complications in at least bone, heart, skin, and eye. Kidney failure can occur at any age, including in children, especially in subjects with hyperoxaluria. Renal dialysis or dual kidney/liver organ transplant as the only treatment options.

[0004] Primary hyperoxaluria (PH) is a rare genetic disorder effecting subjects of all ages from infants to elderly. PH includes three subtypes involving genetic defects that alter the expression of three distinct proteins. PH1 involves alanine-glyoxylate aminotransferase, or AGT/AGT1. PH2 involves glyoxylate/hydroxypyruvate reductase, or GR/HPR, and PH3 involves 4-hydroxy-2-oxoglutarate aldolase, or HOGA. In PH1, mutations are found in the enzyme alanine glyoxylate aminotransferase (AGT or AGT1) that is encoded by the AGXT gene. Normally, AGT converts glyoxylate into glycine in liver peroxisomes. In patients with PH1, mutant AGT is unable to break down glyoxylate, and levels of glyoxylate and its metabolite oxalate increase. Humans cannot oxidize oxalate, and high levels of oxalate in subjects with PH1 cause hyperoxaluria.

[0005] To determine whether a subject has hyperoxaluria, a 24-hour urine may be collected and the oxalate, glycolate, and other organic acid levels are measured. Genetic testing or liver biopsy can be performed for a definitive diagnosis of genetic forms of hyperoxaluria. See, e.g., Cochat P et al., (2012) Nephrol Dial Transplant 5:1729-36. In normal healthy subjects the 24-hour urine oxalate and glycolate levels are less than 45 mg/day but in hyperoxaluria patients, levels of urinary oxalate greater than 100 mg/day are typical. See, e.g., Cochat P. (2013). N Engl J Med 369:649-658.

[0006] Plasma glycolate levels in normal subjects are typically 4-8 micromolar but in hyperoxaluria patients glycolate levels can range widely and are elevated in ⅔rds of hyperoxaluria subjects. See, e.g., Marangella, M et al. (1992) J. Urol. 148:986-989. While most patients with genetic forms of hyperoxaluria are now diagnosed through genetic testing, a 24-hour urine test is the primary method used to follow hyperoxaluria subjects for treatment responses. Id.

[0007] Lactate dehydrogenase (LDH) is an enzyme found in nearly every cell that regulates both the homeostasis of lactate and pyruvate, and of glyoxylate and oxalate metabolism. LDH is comprised of 4 polypeptides that form a tetramer. Five isozymes of LDH differing in their subunit composition and tissue distribution have been identified. The two most common forms of LDH are the muscle (M) form encoded by the LDHA gene, and the heart (H) form encoded by LDHB gene. In the perioxisome of liver cells, LDH is the key enzyme responsible for converting glyoxalate to oxalate which is then secreted into the plasma and excreted by the kidneys. Lai et al. (2018) Mol Ther. 26(8):1983-1995.

[0008] An increase in oxalate production results in the precipitation of calcium oxalate crystals in the kidneys and renal disease. As hyperoxaluria progresses, oxalate is deposited in all tissues. Subjects with hereditary lactate dehydrogenase M-subunit deficiency do not display impaired liver function or a liver-specific phenotype suggesting that inhibiting or diminishing the amount of hepatic lactate dehydrogenase (LDH) expression, the proposed key enzyme responsible for converting glyoxylate to oxalate, may prevent the accumulation of oxalate in subjects with hyperoxaluria without adverse effects due to loss of the lactate dehydrogenase M-subunit. This hypothesis was tested in genetically engineered murine models of hyperoxaluria, and a murine model in which hyperoxaluria is chemically induced with ethylene glycol (EG). See, Kanno, T et al. (1988) Clin. Chim. Acta 173, 89-98; Takahashi, Y et al. (1995) Intern. Med. 34, 326-329; and Tsujino, S et al. (1994) Ann. Neurol. 36, 661-665.

[0009] As LDH is key in the final step of oxalate production, LDHA siRNA directed to hepatocytes via conjugation with N-acetylgalactosamine (GalNAc) residues was used to mediate LDHA silencing in mouse models of hyperoxaluria. See, Lai et al. (2018) Mol Ther. 26(8):1983-1995. Treatment of mice with this LDHA siRNA resulted in a reduction of hepatic LDH and efficient oxalate reduction and prevented calcium oxalate crystal deposition in both genetically engineered mouse models of hyperoxaluria and in chemically induced hyperoxaluria mouse models. Id. Suppression of hepatic LDH in mice did not result in acute elevation of circulating liver enzymes, lactate acidosis, or exertional myopathy.

[0010] The idea of treating patients with hyperoxaluria by inhibition of LDHA is further supported by the LDHA siRNA treatment of both non-human primates and humanized chimeric mice in which the liver is comprised of up to 80% human hepatocytes. Id.

[0011] Accordingly, the following embodiments are provided. In some embodiments, the disclosure provides compositions and methods using a guide RNA with an RNA-guided DNA binding agent such as the CRISPR/Cas system to substantially reduce or knockout expression of the LDHA gene, thereby substantially reducing or eliminating the production of LDH, thereby reducing urinary oxalate and increasing serum glycolate. The substantial reduction or elimination of the production of LDH through alteration of the LDHA gene can be a long-term or permanent treatment for hyperoxaluria.

### SUMMARY

[0012] The following embodiments are provided.

Embodiment 01 A method of inducing a double-stranded break (DSB) or single-stranded break (SSB) within the LDHA gene, comprising delivering a composition to a cell, wherein the composition comprises:
[0013] a. a guide RNA comprising
   [0014] i. a guide sequence selected from SEQ ID NOs:1-84 and 100-192; or
   [0015] ii. at least 17, 18, 19, or 20 contiguous nucleotides of a sequence selected from SEQ ID NOs:1-84 and 100-192; or
   [0016] iii. a guide sequence that is at least 99%, 98%, 97%, 96%, 95%, 94%, 93%, 92%, 91%, or 90% identical to a sequence selected from SEQ ID NOs:1-84 and 100-192; or
   [0017] iv. a guide sequence comprising any one of SEQ ID NOs: 1, 5, 7, 8, 14, 23, 27, 32, 45, 48, 62, 66, 68, 70, 73, 75, 76, 77, 78, and 80; or
   [0018] v. a guide sequence comprising any one of SEQ ID No: 1, 5, 7, 8, 14, 23, 27, 32, 45, and 48; or
   [0019] vi. a guide sequence comprising any one of SEQ ID NOs: 1, 5, 7, 8, 14, 23, 25, 27, 32, 45, 48, 62, 66, 68, 70, 73, 75, 76, 77, 78, 80, 103, 109, 123, 133, 149, 153, 156, and 184; or
   [0020] vii. a guide sequence comprising any one of SEQ ID NOs: 1, 5, 7, 8, 14, 23, 25, 27, 32, 45, 48, 103, and 123; and optionally
[0021] b. an RNA-guided DNA binding agent or a nucleic acid encoding an RNA-guided DNA binding agent.
   Embodiment 02 A method of reducing the expression of the LDHA gene comprising delivering a composition to a cell, wherein the composition comprises:
[0022] a. a guide RNA comprising
   [0023] i. a guide sequence selected from SEQ ID NOs:1-84 and 100-192; or
   [0024] ii. at least 17, 18, 19, or 20 contiguous nucleotides of a sequence selected from SEQ ID NOs:1-84 and 100-192; or
   [0025] iii. a guide sequence that is at least 99%, 98%, 97%, 96%, 95%, 94%, 93%, 92%, 91%, or 90% identical to a sequence selected from SEQ ID NOs:1-84 and 100-192; or
   [0026] iv. a guide sequence comprising any one of SEQ ID NOs: 1, 5, 7, 8, 14, 23, 27, 32, 45, 48, 62, 66, 68, 70, 73, 75, 76, 77, 78, and 80; or
   [0027] v. a guide sequence comprising any one of SEQ ID No: 1, 5, 7, 8, 14, 23, 27, 32, 45, and 48; or
   [0028] vi. a guide sequence comprising any one of SEQ ID NOs: 1, 5, 7, 8, 14, 23, 25, 27, 32, 45, 48, 62, 66, 68, 70, 73, 75, 76, 77, 78, 80, 103, 109, 123, 133, 149, 153, 156, and 184; or
   [0029] vii. a guide sequence comprising any one of SEQ ID NOs: 1, 5, 7, 8, 14, 23, 25, 27, 32, 45, 48, 103, and 123; and optionally
[0030] b. an RNA-guided DNA binding agent or a nucleic acid encoding an RNA-guided DNA binding agent.
   Embodiment 03 A method of treating or preventing hyperoxaluria comprising administering a composition to a subject in need thereof, wherein the composition comprises:
[0031] a. a guide RNA comprising
   [0032] i. a guide sequence selected from SEQ ID NOs:1-84 and 100-192; or
   [0033] ii. at least 17, 18, 19, or 20 contiguous nucleotides of a sequence selected from SEQ ID NOs:1-84 and 100-192; or
   [0034] iii. a guide sequence that is at least 99%, 98%, 97%, 96%, 95%, 94%, 93%, 92%, 91%, or 90% identical to a sequence selected from SEQ ID NOs:1-84 and 100-192; or
   [0035] iv. a guide sequence comprising any one of SEQ ID NOs: 1, 5, 7, 8, 14, 23, 27, 32, 45, 48, 62, 66, 68, 70, 73, 75, 76, 77, 78, and 80; or
   [0036] v. a guide sequence comprising any one of SEQ ID No: 1, 5, 7, 8, 14, 23, 27, 32, 45, and 48; or
   [0037] vi. a guide sequence comprising any one of SEQ ID NOs: 1, 5, 7, 8, 14, 23, 25, 27, 32, 45, 48, 62, 66, 68, 70, 73, 75, 76, 77, 78, 80, 103, 109, 123, 133, 149, 153, 156, and 184; or
   [0038] vii. a guide sequence comprising any one of SEQ ID NOs: 1, 5, 7, 8, 14, 23, 25, 27, 32, 45, 48, 103, and 123; and optionally
[0039] b. an RNA-guided DNA binding agent or nucleic acid encoding an RNA-guided DNA binding agent, thereby treating or preventing hyperoxaluria.
   Embodiment 04 A method of treating or preventing end stage renal disease (ESRD) caused by hyperoxaluria comprising administering a composition to a subject in need thereof, wherein the composition comprises:
[0040] a. a guide RNA comprising
   [0041] i. a guide sequence selected from SEQ ID NOs:1-84 and 100-192; or
   [0042] ii. at least 17, 18, 19, or 20 contiguous nucleotides of a sequence selected from SEQ ID NOs:1-84 and 100-192; or
   [0043] iii. a guide sequence that is at least 99%, 98%, 97%, 96%, 95%, 94%, 93%, 92%, 91%, or 90% identical to a sequence selected from SEQ ID NOs:1-84 and 100-192; or
   [0044] iv. a guide sequence comprising any one of SEQ ID NOs: 1, 5, 7, 8, 14, 23, 27, 32, 45, 48, 62, 66, 68, 70, 73, 75, 76, 77, 78, and 80; or
   [0045] v. a guide sequence comprising any one of SEQ ID NOs: 1, 5, 7, 8, 14, 23, 27, 32, 45, and 48; or
   [0046] vi. a guide sequence comprising any one of SEQ ID NOs: 1, 5, 7, 8, 14, 23, 25, 27, 32, 45, 48, 62, 66, 68, 70, 73, 75, 76, 77, 78, 80, 103, 109, 123, 133, 149, 153, 156, and 184; or
   [0047] vii. a guide sequence comprising any one of SEQ ID NOs: 1, 5, 7, 8, 14, 23, 25, 27, 32, 45, 48, 103, and 123; and optionally
[0048] b. an RNA-guided DNA binding agent or nucleic acid encoding an RNA-guided DNA binding agent, thereby treating or preventing (ESRD) caused by hyperoxaluria.
   Embodiment 05 A method of treating or preventing any one of calcium oxalate production and deposition, primary hyperoxaluria (including PH1, PH2, and PH3), oxalosis, hematuria, enteric hyperoxaluria, hyperoxaluria related to eating high-oxalate foods; and delaying or ameliorating the need for kidney or liver transplant comprising administering a composition to a subject in need thereof, wherein the composition comprises:
[0049] a. a guide RNA comprising
   [0050] i. a guide sequence selected from SEQ ID NOs:1-84 and 100-192; or
   [0051] ii. at least 17, 18, 19, or 20 contiguous nucleotides of a sequence selected from SEQ ID NOs:1-84 and 100-192; or
   [0052] iii. a guide sequence that is at least 99%, 98%, 97%, 96%, 95%, 94%, 93%, 92%, 91%, or 90% identical to a sequence selected from SEQ ID NOs:1-84 and 100-192; or
   [0053] iv. a guide sequence comprising any one of SEQ ID NOs: 1, 5, 7, 8, 14, 23, 27, 32, 45, 48, 62, 66, 68, 70, 73, 75, 76, 77, 78, and 80; or
   [0054] v. a guide sequence comprising any one of SEQ ID No: 1, 5, 7, 8, 14, 23, 27, 32, 45, and 48; or
   [0055] vi. a guide sequence comprising any one of SEQ ID NOs: 1, 5, 7, 8, 14, 23, 25, 27, 32, 45, 48, 62, 66, 68, 70, 73, 75, 76, 77, 78, 80, 103, 109, 123, 133, 149, 153, 156, and 184; or
   [0056] vii. a guide sequence comprising any one of SEQ ID NOs: 1, 5, 7, 8, 14, 23, 25, 27, 32, 45, 48, 103, and 123; and optionally
[0057] b. an RNA-guided DNA binding agent or nucleic acid encoding an RNA-guided DNA binding agent, thereby treating or preventing any one of calcium oxalate production and deposition, primary hyperoxaluria, oxalosis, hematuria, and delaying or ameliorating the need for kidney or liver transplant.
   Embodiment 06 A method of increasing serum glycolate concentration, comprising administering a composition to a subject in need thereof, wherein the composition comprises:
[0058] a. a guide RNA comprising
   [0059] i. a guide sequence selected from SEQ ID NOs:1-84 and 100-192; or
   [0060] ii. at least 17, 18, 19, or 20 contiguous nucleotides of a sequence selected from SEQ ID NOs:1-84 and 100-192; or
   [0061] iii. a guide sequence that is at least 99%, 98%, 97%, 96%, 95%, 94%, 93%, 92%, 91%, or 90% identical to a sequence selected from SEQ ID NOs:1-84 and 100-192; or
   [0062] iv. a guide sequence comprising any one of SEQ ID NOs: 1, 5, 7, 8, 14, 23, 27, 32, 45, 48, 62, 66, 68, 70, 73, 75, 76, 77, 78, and 80; or
   [0063] v. a guide sequence comprising any one of SEQ ID No: 1, 5, 7, 8, 14, 23, 27, 32, 45, and 48; or
   [0064] vi. a guide sequence comprising any one of SEQ ID NOs: 1, 5, 7, 8, 14, 23, 25, 27, 32, 45, 48, 62, 66, 68, 70, 73, 75, 76, 77, 78, 80, 103, 109, 123, 133, 149, 153, 156, and 184; or
   [0065] vii. a guide sequence comprising any one of SEQ ID NOs: 1, 5, 7, 8, 14, 23, 25, 27, 32, 45, 48, 103, and 123; and optionally
[0066] b. an RNA-guided DNA binding agent or nucleic acid encoding an RNA-guided DNA binding agent, thereby increasing serum glycolate concentration.
   Embodiment 07 A method for reducing oxylate in urine in a subject, comprising administering a composition to a subject in need thereof, wherein the composition comprises:
[0067] a. a guide RNA comprising
   [0068] i. a guide sequence selected from SEQ ID NOs:1-84 and 100-192; or
   [0069] ii. at least 17, 18, 19, or 20 contiguous nucleotides of a sequence selected from SEQ ID NOs:1-84 and 100-192; or
   [0070] iii. a guide sequence that is at least 99%, 98%, 97%, 96%, 95%, 94%, 93%, 92%, 91%, or 90% identical to a sequence selected from SEQ ID NOs:1-84 and 100-192; or
   [0071] iv. a guide sequence comprising any one of SEQ ID NOs: 1, 5, 7, 8, 14, 23, 27, 32, 45, 48, 62, 66, 68, 70, 73, 75, 76, 77, 78, and 80; or
   [0072] v. a guide sequence comprising any one of SEQ ID No: 1, 5, 7, 8, 14, 23, 27, 32, 45, and 48; or
   [0073] vi. a guide sequence comprising any one of SEQ ID NOs: 1, 5, 7, 8, 14, 23, 25, 27, 32, 45, 48, 62, 66, 68, 70, 73, 75, 76, 77, 78, 80, 103, 109, 123, 133, 149, 153, 156, and 184; or
   [0074] vii. a guide sequence comprising any one of SEQ ID NOs: 1, 5, 7, 8, 14, 23, 25, 27, 32, 45, 48, 103, and 123; and optionally
[0075] b. an RNA-guided DNA binding agent or nucleic acid encoding an RNA-guided DNA binding agent, thereby reducing oxalate in the urine of a subject.
   Embodiment 08 The method of any one of the preceding embodiments, wherein an RNA-guided DNA binding agent or nucleic acid encoding an RNA-guided DNA binding agent is administered.
   Embodiment 09 A composition comprising:
[0076] a. a guide RNA comprising
   [0077] i. a guide sequence selected from SEQ ID NOs:1-84 and 100-192; or
   [0078] ii. at least 17, 18, 19, or 20 contiguous nucleotides of a sequence selected from SEQ ID NOs:1-84 and 100-192; or
   [0079] iii. a guide sequence that is at least 99%, 98%, 97%, 96%, 95%, 94%, 93%, 92%, 91%, or 90% identical to a sequence selected from SEQ ID NOs:1-84 and 100-192; or
   [0080] iv. a guide sequence comprising any one of SEQ ID NOs: 1, 5, 7, 8, 14, 23, 27, 32, 45, 48, 62, 66, 68, 70, 73, 75, 76, 77, 78, and 80 or
   [0081] v. a guide sequence comprising any one of SEQ ID No: 1, 5, 7, 8, 14, 23, 27, 32, 45, and 48; or
   [0082] vi. a guide sequence comprising any one of SEQ ID NOs: 1, 5, 7, 8, 14, 23, 25, 27, 32, 45, 48, 62, 66, 68, 70, 73, 75, 76, 77, 78, 80, 103, 109, 123, 133, 149, 153, 156, and 184; or
   [0083] vii. a guide sequence comprising any one of SEQ ID NOs: 1, 5, 7, 8, 14, 23, 25, 27, 32, 45, 48, 103, and 123; and optionally
[0084] b. an RNA-guided DNA binding agent or nucleic acid encoding an RNA-guided DNA binding agent.
   Embodiment 10 A composition comprising a short-single guide RNA (short-sgRNA), comprising:
[0085] a. a guide sequence comprising:
   [0086] i. any one of the guide sequences selected from SEQ ID NOs:1-84 and 100-192; or
   [0087] ii. at least 17, 18, 19, or 20 contiguous nucleotides of any one of the guide sequences selected from SEQ ID NOs:1-84 and 100-192; or
   [0088] iii. at least 99%, 98%, 97%, 96%, 95%, 94%, 93%, 92%, 91%, or 90% identical to a sequence selected from SEQ ID NOs:1-84 and 100-192; or
   [0089] iv. any one of SEQ ID NOs: 1, 5, 7, 8, 14, 23, 27, 32, 45, 48, 62, 66, 68, 70, 73, 75, 76, 77, 78, and 80; or
   [0090] v. any one of SEQ ID No: 1, 5, 7, 8, 14, 23, 27, 32, 45, and 48; or
   [0091] vi. a guide sequence comprising any one of SEQ ID NOs: 1, 5, 7, 8, 14, 23, 25, 27, 32, 45, 48, 62, 66, 68, 70, 73, 75, 76, 77, 78, 80, 103, 109, 123, 133, 149, 153, 156, and 184; or
   [0092] vii. a guide sequence comprising any one of SEQ ID NOs: 1, 5, 7, 8, 14, 23, 25, 27, 32, 45, 48, 103, and 123; and
[0093] b. a conserved portion of an sgRNA comprising a hairpin region, wherein the hairpin region lacks at least 5-10 nucleotides and optionally wherein the short-sgRNA comprises one or more of a 5′ end modification and a 3′ end modification.
   Embodiment 11 The composition of embodiment 10, comprising the sequence of SEQ ID NO: 202.
   Embodiment 12 The composition of embodiment 10 or embodiment 11, comprising a 5′ end modification.
   Embodiment 13 The composition of any one of embodiments 10-12, wherein the short-sgRNA comprises a 3′ end modification.
   Embodiment 14 The composition of any one of embodiments 10-13, wherein the short-sgRNA comprises a 5′ end modification and a 3′ end modification.
   Embodiment 15 The composition of any one of embodiments 10-14, wherein the short-sgRNA comprises a 3′ tail.
   Embodiment 16 The composition of embodiment 15, wherein the 3′ tail comprises 1, 2, 3, 4, 5, 6, 7, 8, 9, or 10 nucleotides.
   Embodiment 17 The composition of embodiment 15, wherein the 3′ tail comprises about 1-2, 1-3, 1-4, 1-5, 1-7, 1-10, at least 1-2, at least 1-3, at least 1-4, at least 1-5, at least 1-7, or at least 1-10 nucleotides.
   Embodiment 18 The composition of any one of embodiments 10-17, wherein the short-sgRNA does not comprise a 3′ tail.
   Embodiment 19 The composition of any one of embodiments 10-18, comprising a modification in the hairpin region.
   Embodiment 20 The composition of any one of embodiments 10-19, comprising a 3′ end modification, and a modification in the hairpin region.
   Embodiment 21 The composition of any one of embodiments 10-20, comprising a 3′ end modification, a modification in the hairpin region, and a 5′ end modification.
   Embodiment 22 The composition of any one of embodiments 10-21, comprising a 5′ end modification, and a modification in the hairpin region.
   Embodiment 23 The composition of any one of embodiments 10-22, wherein the hairpin region lacks at least 5 consecutive nucleotides.
   Embodiment 24 The composition of any one of embodiments 10-23, wherein the at least 5-10 lacking nucleotides:
[0094] a. are within hairpin 1;
[0095] b. are within hairpin 1 and the “N” between hairpin 1 and hairpin 2;
[0096] c. are within hairpin 1 and the two nucleotides immediately 3′ of hairpin 1;
[0097] d. include at least a portion of hairpin 1;
[0098] e. are within hairpin 2;
[0099] f. include at least a portion of hairpin 2;
[0100] g. are within hairpin 1 and hairpin 2;
[0101] h. include at least a portion of hairpin 1 and include the “N” between hairpin 1 and hairpin 2;
[0102] i. include at least a portion of hairpin 2 and include the “N” between hairpin 1 and hairpin 2;
[0103] j. include at least a portion of hairpin 1, include the “N” between hairpin 1 and hairpin 2, and include at least a portion of hairpin 2;
[0104] k. are within hairpin 1 or hairpin 2, optionally including the “N” between hairpin 1 and hairpin 2;
[0105] l. are consecutive;
[0106] m. are consecutive and include the “N” between hairpin 1 and hairpin 2;
[0107] n. are consecutive and span at least a portion of hairpin 1 and a portion of hairpin 2;
[0108] o. are consecutive and span at least a portion of hairpin 1 and the “N” between hairpin 1 and hairpin 2;
[0109] p. are consecutive and span at least a portion of hairpin 1 and two nucleotides immediately 3′ of hairpin 1;
[0110] q. consist of 5-10 nucleotides;
[0111] r. consist of 6-10 nucleotides;
[0112] s. consist of 5-10 consecutive nucleotides;
[0113] t. consist of 6-10 consecutive nucleotides; or
[0114] u. consist of nucleotides 54-58 of SEQ ID NO: 400.
   Embodiment 25 The composition of any one of embodiments 10-24, comprising a conserved portion of an sgRNA comprising a nexus region, wherein the nexus region lacks at least one nucleotide.
   Embodiment 26 The composition of embodiment 25, wherein the nucleotides lacking in the nexus region comprise any one or more of:
[0115] a. at least 2, 3, 4, 5, 6, 7, 8, 9, or 10 nucleotides in the nexus region;
[0116] b. at least or exactly 1-2 nucleotides, 1-3 nucleotides, 1-4 nucleotides, 1-5 nucleotides, 1-6 nucleotides, 1-10 nucleotides, or 1-15 nucleotides in the nexus region; and
[0117] c. each nucleotide in the nexus region.
   Embodiment 27 A composition comprising a modified single guide RNA (sgRNA) comprising
[0118] a. a guide sequence comprising:
   [0119] i. any one of the guide sequences selected from SEQ ID NOs:1-84 and 100-192; or
   [0120] ii. at least 17, 18, 19, or 20 contiguous nucleotides of any one of the guide sequences selected from SEQ ID NOs:1-84 and 100-192; or
   [0121] iii. at least 99%, 98%, 97%, 96%, 95%, 94%, 93%, 92%, 91%, or 90% identical to a sequence selected from SEQ ID NOs:1-84 and 100-192; or
   [0122] iv. any one of SEQ ID NOs: 1, 5, 7, 8, 14, 23, 27, 32, 45, 48, 62, 66, 68, 70, 73, 75, 76, 77, 78, and 80; or
   [0123] v. any one of SEQ ID No: 1, 5, 7, 8, 14, 23, 27, 32, 45, and 48; or
   [0124] vi. any one of SEQ ID NOs: 1, 5, 7, 8, 14, 23, 25, 27, 32, 45, 48, 62, 66, 68, 70, 73, 75, 76, 77, 78, 80, 103, 109, 123, 133, 149, 153, 156, and 184; or
   [0125] vii. any one of SEQ ID NOs: 1, 5, 7, 8, 14, 23, 25, 27, 32, 45, 48, 103, and 123; and further comprising
[0126] b. one or more modifications selected from:
   [0127] 1. a YA modification at one or more guide region YA sites;
   [0128] 2. a YA modification at one or more conserved region YA sites;
   [0129] 3. a YA modification at one or more guide region YA sites and at one or more conserved region YA sites;
   [0130] 4. i) a YA modification at two or more guide region YA sites;
      [0131] ii) a YA modification at one or more of conserved region YA sites 2, 3, 4, and 10; and
      [0132] iii) a YA modification at one or more of conserved region YA sites 1 and 8; or
   [0133] 5. i) a YA modification at one or more guide region YA sites, wherein the guide region YA site is at or after nucleotide 8 from the 5′ end of the 5′ terminus;
      [0134] ii) a YA modification at one or more of conserved region YA sites 2, 3, 4, and 10; and optionally;
      [0135] iii) a YA modification at one or more of conserved region YA sites 1 and 8; or
   [0136] 6. i) a YA modification at one or more guide region YA sites, wherein the guide region YA site is within 13 nucleotides of the 3′ terminal nucleotide of the guide region;
      [0137] ii) a YA modification at one or more of conserved region YA sites 2, 3, 4, and 10; and
      [0138] iii) a YA modification at one or more of conserved region YA sites 1 and 8; or
   [0139] 7. i) a 5′ end modification and a 3′ end modification;
      [0140] ii) a YA modification at one or more of conserved region YA sites 2, 3, 4, and 10; and
      [0141] iii) a YA modification at one or more of conserved region YA sites 1 and 8; or
   [0142] 8. i) a YA modification at a guide region YA site, wherein the modification of the guide region YA site comprises a modification that at least one nucleotide located 5′ of the guide region YA site does not comprise;
      [0143] ii) a YA modification at one or more of conserved region YA sites 2, 3, 4, and 10; and
      [0144] iii) a YA modification at one or more of conserved region YA sites 1 and 8; or
   [0145] 9. i) a YA modification at one or more of conserved region YA sites 2, 3, 4, and 10; and
      [0146] ii) a YA modification at conserved region YA sites 1 and 8; or
   [0147] 10. i) a YA modification at one or more guide region YA sites, wherein the YA site is at or after nucleotide 8 from the 5′ terminus;
      [0148] ii) a YA modification at one or more of conserved region YA sites 2, 3, 4, and 10; and
      [0149] iii) a modification at one or more of H1-1 and H2-1; or
   [0150] 11. i) a YA modification at one or more of conserved region YA sites 2, 3, 4, and 10;
      [0151] ii) a YA modification at one or more of conserved region YA sites 1, 5, 6, 7, 8, and 9; and
      [0152] iii) a modification at one or more of H1-1 and H2-1; or
   [0153] 12. i) a modification, such as a YA modification, at one or more nucleotides located at or after nucleotide 6 from the 5′ terminus;
      [0154] ii) a YA modification at one or more guide sequence YA sites;
      [0155] iii) a modification at one or more of B3, B4, and B5, wherein B6 does not comprise a 2′-OMe modification or comprises a modification other than 2′-OMe;
      [0156] iv) a modification at LS10, wherein LS10 comprises a modification other than 2′-fluoro; and/or
      [0157] v) a modification at N2, N3, N4, N5, N6, N7, N10, or N11; and wherein at least one of the following is true:
         [0158] i. a YA modification at one or more guide region YA sites;
         [0159] ii. a YA modification at one or more conserved region YA sites;
         [0160] iii. a YA modification at one or more guide region YA sites and at one or more conserved region YA sites;
         [0161] iv. at least one of nucleotides 8-11, 13, 14, 17, or 18 from the 5′ end of the 5′ terminus does not comprise a 2′-fluoro modification;
         [0162] v. at least one of nucleotides 6-10 from the 5′ end of the 5′ terminus does not comprise a phosphorothioate linkage;
         [0163] vi. at least one of B2, B3, B4, or B5 does not comprise a 2′-OMe modification;
         [0164] vii. at least one of LS1, LS8, or LS10 does not comprise a 2′-OMe modification;
         [0165] viii. at least one of N2, N3, N4, N5, N6, N7, N10, N11, N16, or N17 does not comprise a 2′-OMe modification;
         [0166] ix. H1-1 comprises a modification;
         [0167] x. H2-1 comprises a modification; or
         [0168] xi. at least one of H1-2, H1-3, H1-4, H1-5, H1-6, H1-7, H1-8, H1-9, H1-10, H2-1, H2-2, H2-3, H2-4, H2-5, H2-6, H2-7, H2-8, H2-9, H2-10, H2-11, H2-12, H2-13, H2-14, or H2-15 does not comprise a phosphorothioate linkage.
            Embodiment 28 The composition of embodiment 27, comprising SEQ ID NO: 450.
            Embodiment 29 The composition of any one of embodiments 9-28, for use in inducing a double-stranded break (DSB) or single-stranded break (SSB) within the LDHA gene in a cell or subject.
            Embodiment 30 The composition of any one of embodiments 9-28, for use in reducing the expression of the LDHA gene in a cell or subject.
            Embodiment 31 The composition of any one of embodiments 9-28, for use in treating or preventing hyperoxaluria in a subject.
            Embodiment 32 The composition of any one of embodiments 9-28, for use in increasing serum and/or plasma glycolate concentration in a subject.
            Embodiment 33 The composition of any one of embodiments 9-28, for use in reducing urinary oxalate concentration in a subject.
            Embodiment 34 The composition of any one of embodiments 9-28, for use in treating or preventing oxalate production, calcium oxalate deposition in organs, primary hyperoxaluria, oxalosis, including systemic oxalosis, hematuria, end stage renal disease (ESRD) and/or delaying or ameliorating the need for kidney or liver transplant.
            Embodiment 35 The method of any of embodiments 1-8, further comprising:
[0169] a. inducing a double-stranded break (DSB) within the LDHA gene in a cell or subject;
[0170] b. reducing the expression of the LDHA gene in a cell or subject;
[0171] c. treating or preventing hyperoxaluria in a subject;
[0172] d. treating or preventing primary hyperoxaluria in a subject;
[0173] e. treating or preventing PH1, PH2, and/or PH3 in a subject;
[0174] f. treating or preventing enteric hyperoxaluria in a subject;
[0175] g. treating or preventing hyperoxaluria related to eating high-oxalate foods in a subject;
[0176] h. increasing serum and/or plasma glycolate concentration in a subject;
[0177] i. reducing urinary oxalate concentration in a subject;
[0178] j. reducing oxalate production;
[0179] k. reducing calcium oxalate deposition in organs;
[0180] l. reducing hyperoxaluria;
[0181] m. treating or preventing oxalosis, including systemic oxalosis;
[0182] n. treating or preventing hematuria;
[0183] o. preventing end stage renal disease (ESRD); and/or
[0184] p. delaying or ameliorating the need for kidney or liver transplant.
   Embodiment 36 The method or composition for use of any one of embodiments 1-8 or 29-35, wherein the composition increases serum and/or plasma glycolate levels.
   Embodiment 37 The method or composition for use of any one of embodiments 1-8 or 29-35, wherein the composition results in editing of the LDHA gene.
   Embodiment 38 The method or composition for use of embodiment 37, wherein the editing is calculated as a percentage of the population that is edited (percent editing).
   Embodiment 39 The method or composition for use of embodiment 38, wherein the percent editing is between 30 and 99% of the population.
   Embodiment 40 The method or composition for use of embodiment 38, wherein the percent editing is between 30 and 35%, 35 and 40%, 40 and 45%, 45 and 50%, 50 and 55%, 55 and 60%, 60 and 65%, 65 and 70%, 70 and 75%, 75 and 80%, 80 and 85%, 85 and 90%, 90 and 95%, or 95 and 99% of the population.
   Embodiment 41 The method or composition for use of any one of embodiments 1-8 or 29-35, wherein the composition reduces urinary oxalate concentration.
   Embodiment 42 The method or composition for use of embodiment 41, wherein a reduction in urinary oxalate results in decreased kidney stones and/or calcium oxalate deposition in the kidney, liver, bladder, heart, skin or eye.
   Embodiment 43 The method or composition of any one of the preceding embodiments, wherein the guide sequence is selected from
[0185] a. SEQ ID NOs:1-84 and 100-192;
[0186] b. SEQ ID NOs: 1, 5, 7, 8, 14, 23, 27, 32, 45, 48, 62, 66, 68, 70, 73, 75, 76, 77, 78, and 80;
[0187] c. SEQ ID NOs: 1, 5, 7, 8, 14, 23, 27, 32, 45, and 48;
[0188] d. SEQ ID NOs: 1, 5, 7, 8, 14, 23, 25, 27, 32, 45, 48, 62, 66, 68, 70, 73, 75, 76, 77, 78, 80, 103, 109, 123, 133, 149, 153, 156, and 184; and
[0189] e. SEQ ID NOs: 1, 5, 7, 8, 14, 23, 25, 27, 32, 45, 48, 103, and 123.
   Embodiment 44 The method or composition of any one of the preceding embodiments, wherein the composition comprises an sgRNA comprising
[0190] a. any one of SEQ ID NOs: 1001, 1005, 1007, 1008, 1014, 1023, 1027, 1032, 1045, 1048, 1063, 1067, 1069, 1071, 1074, 1076, 1077, 1078, 1079, and 1081; or
[0191] b. any one of SEQ ID NOs: 2001, 2005, 2007, 2008, 2014, 2023, 2027, 2032, 2045, 2048, 2063, 2067, 2069, 2071, 2074, 2076, 2077, 2078, 2079, and 2081; or
[0192] c. a guide sequence selected from SEQ ID NOs: 1, 5, 7, 8, 14, 23, 27, 32, 45, 48, 62, 66, 68, 70, 73, 75, 76, 77, 78, and 80; or
[0193] d. a guide sequence selected from SEQ ID NOs: 1, 5, 7, 8, 14, 23, 27, 32, 45, and 48;
[0194] e. a guide sequence selected from SEQ ID NOs: 1, 5, 7, 8, 14, 23, 25, 27, 32, 45, 48, 62, 66, 68, 70, 73, 75, 76, 77, 78, 80, 103, 109, 123, 133, 149, 153, 156, and 184; and
[0195] f. a guide sequence selected from SEQ ID NOs: 1, 5, 7, 8, 14, 23, 25, 27, 32, 45, 48, 103, and 123.
   Embodiment 45 The method or composition of any one of the preceding embodiments, wherein the target sequence is in any one of exons 1-8 of the human LDHA gene.
   Embodiment 46 The method or composition of embodiment 45, wherein the target sequence is in exon 1 or 2 of the human LDHA gene.
   Embodiment 47 The method or composition of embodiment 45, wherein the target sequence is in exon 3 of the human LDHA gene.
   Embodiment 48 The method or composition of embodiment 45, wherein the target sequence is in exon 4 of the human LDHA gene.
   Embodiment 49 The method or composition of embodiment 45, wherein the target sequence is in exon 5 or 6 of the human LDHA gene.
   Embodiment 50 The method or composition of embodiment 45, wherein the target sequence is in exon 7 or 8 of the human LDHA gene.
   Embodiment 51 The method or composition of any one of embodiments 1-50, wherein the guide sequence is complementary to a target sequence in the positive strand of LDHA.
   Embodiment 52 The method or composition of any one of embodiments 1-50, wherein the guide sequence is complementary to a target sequence in the negative strand of LDHA.
   Embodiment 53 The method or composition of any one of embodiments 1-50, wherein the first guide sequence is complementary to a first target sequence in the positive strand of the LDHA gene, and wherein the composition further comprises a second guide sequence that is complementary to a second target sequence in the negative strand of the LDHA gene.
   Embodiment 54 The method or composition of any one of the preceding embodiments, wherein the guide RNA comprises a guide sequence selected from any one of SEQ ID NOs 1-84 and 100-192 and further comprises a nucleotide sequence of SEQ ID NO: 200, wherein the nucleotides of SEQ ID NO: 200 follow the guide sequence at its 3′ end.
   Embodiment 55 The method or composition of any one of the preceding embodiments, wherein the guide RNA comprises a guide sequence selected from any one of SEQ ID NOs 1-84 and 100-192 and further comprises a nucleotide sequence of SEQ ID NO: 201, SEQ ID NO: 202, SEQ ID NO: 203, or any one of SEQ ID NO: 400-450 wherein the nucleotides of SEQ ID NO: 201, SEQ ID NO: 202, or SEQ ID NO: 203 follow the guide sequence at its 3′ end.
   Embodiment 56 The method or composition of any one of the preceding embodiments, wherein the guide RNA is a single guide (sgRNA).
   Embodiment 57 The method or composition of embodiment 56, wherein the sgRNA comprises a guide sequence comprising any one of SEQ ID NOs: 1001, 1005, 1007, 1008, 1014, 1023, 1027, 1032, 1045, 1048, 1063, 1067, 1069, 1071, 1074, 1076, 1077, 1078, 1079, and 1081.
   Embodiment 58 The method or composition of embodiment 56, wherein the sgRNA comprises any one of SEQ ID NOs: 1001, 1005, 1007, 1008, 1014, 1023, 1027, 1032, 1045, 1048, 1063, 1067, 1069, 1071, 1074, 1076, 1077, 1078, 1079, and 1081, or modified versions thereof, optionally wherein the modified versions comprise SEQ ID NOs: 2001, 2005, 2007, 2008, 2014, 2023, 2027, 2032, 2045, 2048, 2063, 2067, 2069, 2071, 2074, 2076, 2077, 2078, 2079, and 2081.
   Embodiment 59 The method or composition of any one of the preceding embodiments, wherein the guide RNA is modified according to the pattern of SEQ ID NO: 300, wherein the N's are collectively any one of the guide sequences of Table 1 (SEQ ID NOs 1-84 and 100-192).
   Embodiment 60 The method or composition of embodiment 59, wherein each N in SEQ ID NO: 300 is any natural or non-natural nucleotide, wherein the N's form the guide sequence, and the guide sequence targets Cas9 to the LDHA gene.
   Embodiment 61 The method or composition of any one of the preceding embodiments, wherein the sgRNA comprises any one of the guide sequences of SEQ ID NOs:1-84 and 100-192 and the nucleotides of SEQ ID NO: 201, SEQ ID NO: 202, or SEQ ID NO: 203.
   Embodiment 62 The method or composition of any one of embodiments 56-61, wherein the sgRNA comprises a guide sequence that is at least 99%, 98%, 97%, 96%, 95%, 94%, 93%, 92%, 91%, or 90% identical to a sequence selected from SEQ ID NOs: 1-84 and 100-192.
   Embodiment 63 The method or composition of embodiment 62, wherein the sgRNA comprises a sequence selected from SEQ ID NOs: 1, 5, 7, 8, 14, 23, 27, 32, 45, 48, 62, 66, 68, 70, 73, 75, 76, 77, 78, 80, 1001, 1005, 1007, 1008, 1014, 1023, 1027, 1032, 1045, 1048, 1063, 1067, 1069, 1071, 1074, 1076, 1077, 1078, 1079, 1081, 2001, 2005, 2007, 2008, 2014, 2023, 2027, 2032, 2045, 2048, 2063, 2067, 2069, 2071, 2074, 2076, 2077, 2078, 2079, and 2081.
   Embodiment 64 The method or composition of any one of the preceding embodiments, wherein the guide RNA comprises at least one modification.
   Embodiment 65 The method or composition of embodiment 64, wherein the at least one modification includes a 2′-O-methyl (2′-O-Me) modified nucleotide.
   Embodiment 66 The method or composition of embodiment 64 or 65, comprising a phosphorothioate (PS) bond between nucleotides.
   Embodiment 67 The method or composition of any one of embodiments 64-66, comprising a 2′-fluoro (2′-F) modified nucleotide.
   Embodiment 68 The method or composition of any one of embodiments 64-67, comprising a modification at one or more of the first five nucleotides at the 5′ end of the guide RNA.
   Embodiment 69 The method or composition of any one of embodiments 64-68, comprising a modification at one or more of the last five nucleotides at the 3′ end of the guide RNA.
   Embodiment 70 The method or composition of any one of embodiments 64-69, comprising a PS bond between the first four nucleotides of the guide RNA.
   Embodiment 71 The method or composition of any one of embodiments 64-70, comprising a PS bond between the last four nucleotides of the guide RNA.
   Embodiment 72 The method or composition of any one of embodiments 64-71, comprising a 2′-O-Me modified nucleotide at the first three nucleotides at the 5′ end of the guide RNA.
   Embodiment 73 The method or composition of any one of embodiments 64-72, comprising a 2′-O-Me modified nucleotide at the last three nucleotides at the 3′ end of the guide RNA.
   Embodiment 74 The method or composition of any one of embodiments 64-73, wherein the guide RNA comprises the modified nucleotides of SEQ ID NO: 300.
   Embodiment 75 The method or composition of any one of embodiments 1-74, wherein the composition further comprises a pharmaceutically acceptable excipient.
   Embodiment 76 The method or composition of any one of embodiments 1-75, wherein the guide RNA is associated with a lipid nanoparticle (LNP).
   Embodiment 77 The method or composition of embodiment 76, wherein the LNP comprises a cationic lipid.
   Embodiment 78 The method or composition of embodiment 77, wherein the cationic lipid is (9Z,12Z)-3-((4,4-bis(octyloxy)butanoyl)oxy)-2-((((3-(diethylamino)propoxy)carbonyl)oxy)methyl)propyl octadeca-9,12-dienoate, also called 3-((4,4-bis(octyloxy)butanoyl)oxy)-2-((((3-(diethylamino)propoxy)carbonyl)oxy)methyl)propyl (9Z,12Z)-octadeca-9,12-dienoate.
   Embodiment 79 The method or composition of any one of embodiments 76-78, wherein the LNP comprises a neutral lipid.
   Embodiment 80 The method or composition of embodiment 79, wherein the neutral lipid is DSPC.
   Embodiment 81 The method or composition of any one of embodiments 76-80, wherein the LNP comprises a helper lipid.
   Embodiment 82 The method or composition of embodiment 81, wherein the helper lipid is cholesterol.
   Embodiment 83 The method or composition of any one of embodiments 76-82, wherein the LNP comprises a stealth lipid.
   Embodiment 84 The method or composition of embodiment 83, wherein the stealth lipid is PEG2k-DMG.
   Embodiment 85 The method or composition of any one of the preceding embodiments, wherein the composition further comprises an RNA-guided DNA binding agent.
   Embodiment 86 The method or composition of any one of the preceding embodiments, wherein the composition further comprises an mRNA that encodes an RNA-guided DNA binding agent.
   Embodiment 87 The method or composition of embodiment 85 or 86, wherein the RNA-guided DNA binding agent is Cas9.
   Embodiment 88 The method or composition of any one of the preceding embodiments, wherein the composition is a pharmaceutical formulation and further comprises a pharmaceutically acceptable carrier.
   Embodiment 89 The method or composition of any one of embodiments 1-88, wherein the sequence selected from SEQ ID NOs:1-84 and 100-192 is SEQ ID NO: 1.
   Embodiment 90 The method or composition of any one of embodiments 1-88, wherein the sequence selected from SEQ ID NOs:1-84 and 100-192 is SEQ ID NO: 2.
   Embodiment 91 The method or composition of any one of embodiments 1-88, wherein the sequence selected from SEQ ID NOs:1-84 and 100-192 is SEQ ID NO: 3.
   Embodiment 92 The method or composition of any one of embodiments 1-88, wherein the sequence selected from SEQ ID NOs:1-84 and 100-192 is SEQ ID NO: 4.
   Embodiment 93 The method or composition of any one of embodiments 1-88, wherein the sequence selected from SEQ ID NOs:1-84 and 100-192 is SEQ ID NO: 5.
   Embodiment 94 The method or composition of any one of embodiments 1-88, wherein the sequence selected from SEQ ID NOs:1-84 and 100-192 is SEQ ID NO: 6.
   Embodiment 95 The method or composition of any one of embodiments 1-88, wherein the sequence selected from SEQ ID NOs:1-84 and 100-192 is SEQ ID NO: 7.
   Embodiment 96 The method or composition of any one of embodiments 1-88, wherein the sequence selected from SEQ ID NOs:1-84 and 100-192 is SEQ ID NO: 8.
   Embodiment 97 The method or composition of any one of embodiments 1-88, wherein the sequence selected from SEQ ID NOs:1-84 and 100-192 is SEQ ID NO: 9.
   Embodiment 98 The method or composition of any one of embodiments 1-88, wherein the sequence selected from SEQ ID NOs: 1-84 and 100-192 is SEQ ID NO: 10.
   Embodiment 99 The method or composition of any one of embodiments 1-88, wherein the sequence selected from SEQ ID NOs:1-84 and 100-192 is SEQ ID NO: 11.
   Embodiment 100 The method or composition of any one of embodiments 1-88, wherein the sequence selected from SEQ ID NOs:1-84 and 100-192 is SEQ ID NO: 12.
   Embodiment 101 The method or composition of any one of embodiments 1-88, wherein the sequence selected from SEQ ID NOs:1-84 and 100-192 is SEQ ID NO: 13.
   Embodiment 102 The method or composition of any one of embodiments 1-88, wherein the sequence selected from SEQ ID NOs:1-84 and 100-192 is SEQ ID NO: 14.
   Embodiment 103 The method or composition of any one of embodiments 1-88, wherein the sequence selected from SEQ ID NOs:1-84 and 100-192 is SEQ ID NO: 15.
   Embodiment 104 The method or composition of any one of embodiments 1-88, wherein the sequence selected from SEQ ID NOs:1-84 and 100-192 is SEQ ID NO: 16.
   Embodiment 105 The method or composition of any one of embodiments 1-88, wherein the sequence selected from SEQ ID NOs:1-84 and 100-192 is SEQ ID NO: 17.
   Embodiment 106 The method or composition of any one of embodiments 1-88, wherein the sequence selected from SEQ ID NOs:1-84 and 100-192 is SEQ ID NO: 18.
   Embodiment 107 The method or composition of any one of embodiments 1-88, wherein the sequence selected from SEQ ID NOs:1-84 and 100-192 is SEQ ID NO: 19.
   Embodiment 108 The method or composition of any one of embodiments 1-88, wherein the sequence selected from SEQ ID NOs:1-84 and 100-192 is SEQ ID NO: 20.
   Embodiment 109 The method or composition of any one of embodiments 1-88, wherein the sequence selected from SEQ ID NOs:1-84 and 100-192 is SEQ ID NO: 21.
   Embodiment 110 The method or composition of any one of embodiments 1-88, wherein the sequence selected from SEQ ID NOs:1-84 and 100-192 is SEQ ID NO: 22.
   Embodiment 111 The method or composition of any one of embodiments 1-88, wherein the sequence selected from SEQ ID NOs:1-84 and 100-192 is SEQ ID NO: 23.
   Embodiment 112 The method or composition of any one of embodiments 1-88, wherein the sequence selected from SEQ ID NOs:1-84 and 100-192 is SEQ ID NO: 24.
   Embodiment 113 The method or composition of any one of embodiments 1-88, wherein the sequence selected from SEQ ID NOs:1-84 and 100-192 is SEQ ID NO: 25.
   Embodiment 114 The method or composition of any one of embodiments 1-88, wherein the sequence selected from SEQ ID NOs:1-84 and 100-192 is SEQ ID NO: 26.
   Embodiment 115 The method or composition of any one of embodiments 1-88, wherein the sequence selected from SEQ ID NOs:1-84 and 100-192 is SEQ ID NO: 27.
   Embodiment 116 The method or composition of any one of embodiments 1-88, wherein the sequence selected from SEQ ID NOs:1-84 and 100-192 is SEQ ID NO: 28.
   Embodiment 117 The method or composition of any one of embodiments 1-88, wherein the sequence selected from SEQ ID NOs:1-84 and 100-192 is SEQ ID NO: 29.
   Embodiment 118 The method or composition of any one of embodiments 1-88, wherein the sequence selected from SEQ ID NOs:1-84 and 100-192 is SEQ ID NO: 30.
   Embodiment 119 The method or composition of any one of embodiments 1-88, wherein the sequence selected from SEQ ID NOs:1-84 and 100-192 is SEQ ID NO: 31.
   Embodiment 120 The method or composition of any one of embodiments 1-88, wherein the sequence selected from SEQ ID NOs:1-84 and 100-192 is SEQ ID NO: 32.
   Embodiment 121 The method or composition of any one of embodiments 1-88, wherein the sequence selected from SEQ ID NOs:1-84 and 100-192 is SEQ ID NO: 33.
   Embodiment 122 The method or composition of any one of embodiments 1-88, wherein the sequence selected from SEQ ID NOs:1-84 and 100-192 is SEQ ID NO: 34.
   Embodiment 123 The method or composition of any one of embodiments 1-88, wherein the sequence selected from SEQ ID NOs:1-84 and 100-192 is SEQ ID NO: 35.
   Embodiment 124 The method or composition of any one of embodiments 1-88, wherein the sequence selected from SEQ ID NOs:1-84 and 100-192 is SEQ ID NO: 36.
   Embodiment 125 The method or composition of any one of embodiments 1-88, wherein the sequence selected from SEQ ID NOs:1-84 and 100-192 is SEQ ID NO: 37.
   Embodiment 126 The method or composition of any one of embodiments 1-88, wherein the sequence selected from SEQ ID NOs:1-84 and 100-192 is SEQ ID NO: 38.
   Embodiment 127 The method or composition of any one of embodiments 1-88, wherein the sequence selected from SEQ ID NOs:1-84 and 100-192 is SEQ ID NO: 39.
   Embodiment 128 The method or composition of any one of embodiments 1-88, wherein the sequence selected from SEQ ID NOs:1-84 and 100-192 is SEQ ID NO: 40.
   Embodiment 129 The method or composition of any one of embodiments 1-88, wherein the sequence selected from SEQ ID NOs:1-84 and 100-192 is SEQ ID NO: 41.
   Embodiment 130 The method or composition of any one of embodiments 1-88, wherein the sequence selected from SEQ ID NOs:1-84 and 100-192 is SEQ ID NO: 42.
   Embodiment 131 The method or composition of any one of embodiments 1-88, wherein the sequence selected from SEQ ID NOs:1-84 and 100-192 is SEQ ID NO: 43.
   Embodiment 132 The method or composition of any one of embodiments 1-88, wherein the sequence selected from SEQ ID NOs:1-84 and 100-192 is SEQ ID NO: 44.
   Embodiment 133 The method or composition of any one of embodiments 1-88, wherein the sequence selected from SEQ ID NOs:1-84 and 100-192 is SEQ ID NO: 45.
   Embodiment 134 The method or composition of any one of embodiments 1-88, wherein the sequence selected from SEQ ID NOs:1-84 and 100-192 is SEQ ID NO: 46.
   Embodiment 135 The method or composition of any one of embodiments 1-88, wherein the sequence selected from SEQ ID NOs:1-84 and 100-192 is SEQ ID NO: 47.
   Embodiment 136 The method or composition of any one of embodiments 1-88, wherein the sequence selected from SEQ ID NOs:1-84 and 100-192 is SEQ ID NO: 48.
   Embodiment 137 The method or composition of any one of embodiments 1-88, wherein the sequence selected from SEQ ID NOs:1-84 and 100-192 is SEQ ID NO: 49.
   Embodiment 138 The method or composition of any one of embodiments 1-88, wherein the sequence selected from SEQ ID NOs:1-84 and 100-192 is SEQ ID NO: 50.
   Embodiment 139 The method or composition of any one of embodiments 1-88, wherein the sequence selected from SEQ ID NOs:1-84 and 100-192 is SEQ ID NO: 51.
   Embodiment 140 The method or composition of any one of embodiments 1-88, wherein the sequence selected from SEQ ID NOs:1-84 and 100-192 is SEQ ID NO: 52.
   Embodiment 141 The method or composition of any one of embodiments 1-88, wherein the sequence selected from SEQ ID NOs:1-84 and 100-192 is SEQ ID NO: 53.
   Embodiment 142 The method or composition of any one of embodiments 1-88, wherein the sequence selected from SEQ ID NOs:1-84 and 100-192 is SEQ ID NO: 54.
   Embodiment 143 The method or composition of any one of embodiments 1-88, wherein the sequence selected from SEQ ID NOs:1-84 and 100-192 is SEQ ID NO: 55.
   Embodiment 144 The method or composition of any one of embodiments 1-88, wherein the sequence selected from SEQ ID NOs:1-84 and 100-192 is SEQ ID NO: 56.
   Embodiment 145 The method or composition of any one of embodiments 1-88, wherein the sequence selected from SEQ ID NOs:1-84 and 100-192 is SEQ ID NO: 57.
   Embodiment 146 The method or composition of any one of embodiments 1-88, wherein the sequence selected from SEQ ID NOs:1-84 and 100-192 is SEQ ID NO: 58.
   Embodiment 147 The method or composition of any one of embodiments 1-88, wherein the sequence selected from SEQ ID NOs:1-84 and 100-192 is SEQ ID NO: 59.
   Embodiment 148 The method or composition of any one of embodiments 1-88, wherein the sequence selected from SEQ ID NOs:1-84 and 100-192 is SEQ ID NO: 60.
   Embodiment 149 The method or composition of any one of embodiments 1-88, wherein the sequence selected from SEQ ID NOs:1-84 and 100-192 is SEQ ID NO: 61.
   Embodiment 150 The method or composition of any one of embodiments 1-88, wherein the sequence selected from SEQ ID NOs:1-84 and 100-192 is SEQ ID NO: 62.
   Embodiment 151 The method or composition of any one of embodiments 1-88, wherein the sequence selected from SEQ ID NOs:1-84 and 100-192 is SEQ ID NO: 63.
   Embodiment 152 The method or composition of any one of embodiments 1-88, wherein the sequence selected from SEQ ID NOs:1-84 and 100-192 is SEQ ID NO: 64.
   Embodiment 153 The method or composition of any one of embodiments 1-88, wherein the sequence selected from SEQ ID NOs:1-84 and 100-192 is SEQ ID NO: 65.
   Embodiment 154 The method or composition of any one of embodiments 1-88, wherein the sequence selected from SEQ ID NOs:1-84 and 100-192 is SEQ ID NO: 66.
   Embodiment 155 The method or composition of any one of embodiments 1-88, wherein the sequence selected from SEQ ID NOs:1-84 and 100-192 is SEQ ID NO: 67.
   Embodiment 156 The method or composition of any one of embodiments 1-88, wherein the sequence selected from SEQ ID NOs:1-84 and 100-192 is SEQ ID NO: 68.
   Embodiment 157 The method or composition of any one of embodiments 1-88, wherein the sequence selected from SEQ ID NOs:1-84 and 100-192 is SEQ ID NO: 69.
   Embodiment 158 The method or composition of any one of embodiments 1-88, wherein the sequence selected from SEQ ID NOs:1-84 and 100-192 is SEQ ID NO: 70.
   Embodiment 159 The method or composition of any one of embodiments 1-88, wherein the sequence selected from SEQ ID NOs:1-84 and 100-192 is SEQ ID NO: 71.
   Embodiment 160 The method or composition of any one of embodiments 1-88, wherein the sequence selected from SEQ ID NOs:1-84 and 100-192 is SEQ ID NO: 72.
   Embodiment 161 The method or composition of any one of embodiments 1-88, wherein the sequence selected from SEQ ID NOs:1-84 and 100-192 is SEQ ID NO: 73.
   Embodiment 162 The method or composition of any one of embodiments 1-88, wherein the sequence selected from SEQ ID NOs:1-84 and 100-192 is SEQ ID NO: 74.
   Embodiment 163 The method or composition of any one of embodiments 1-88, wherein the sequence selected from SEQ ID NOs:1-84 and 100-192 is SEQ ID NO: 75.
   Embodiment 164 The method or composition of any one of embodiments 1-88, wherein the sequence selected from SEQ ID NOs:1-84 and 100-192 is SEQ ID NO: 76.
   Embodiment 165 The method or composition of any one of embodiments 1-88, wherein the sequence selected from SEQ ID NOs:1-84 and 100-192 is SEQ ID NO: 77.
   Embodiment 166 The method or composition of any one of embodiments 1-88, wherein the sequence selected from SEQ ID NOs:1-84 and 100-192 is SEQ ID NO: 78.
   Embodiment 167 The method or composition of any one of embodiments 1-88, wherein the sequence selected from SEQ ID NOs:1-84 and 100-192 is SEQ ID NO: 79.
   Embodiment 168 The method or composition of any one of embodiments 1-88, wherein the sequence selected from SEQ ID NOs:1-84 and 100-192 is SEQ ID NO: 80.
   Embodiment 169 The method or composition of any one of embodiments 1-88, wherein the sequence selected from SEQ ID NOs:1-84 and 100-192 is SEQ ID NO: 81.
   Embodiment 170 The method or composition of any one of embodiments 1-88, wherein the sequence selected from SEQ ID NOs:1-84 and 100-192 is SEQ ID NO: 82.
   Embodiment 171 The method or composition of any one of embodiments 1-88, wherein the sequence selected from SEQ ID NOs:1-84 and 100-192 is SEQ ID NO: 83.
   Embodiment 172 The method or composition of any one of embodiments 1-88, wherein the sequence selected from SEQ ID NOs:1-84 and 100-192 is SEQ ID NO: 84.
   Embodiment 173 The method or composition of any one of embodiments 1-88, wherein the sequence selected from SEQ ID NOs:1-84 and 100-192 is SEQ ID NO: 103.
   Embodiment 174 The method or composition of any one of embodiments 1-88, wherein the sequence selected from SEQ ID NOs:1-84 and 100-192 is SEQ ID NO: 109.
   Embodiment 175 The method or composition of any one of embodiments 1-88, wherein the sequence selected from SEQ ID NOs:1-84 and 100-192 is SEQ ID NO: 123.
   Embodiment 176 The method or composition of any one of embodiments 1-88, wherein the sequence selected from SEQ ID NOs:1-84 and 100-192 is SEQ ID NO: 133.
   Embodiment 177 The method or composition of any one of embodiments 1-88, wherein the sequence selected from SEQ ID NOs:1-84 and 100-192 is SEQ ID NO: 149.
   Embodiment 178 The method or composition of any one of embodiments 1-88, wherein the sequence selected from SEQ ID NOs:1-84 and 100-192 is SEQ ID NO: 156.
   Embodiment 179 The method or composition of any one of embodiments 1-88, wherein the sequence selected from SEQ ID NOs:1-84 and 100-192 is SEQ ID NO: 166.
   Embodiment 180 The method or composition of any one of embodiments 1-88, wherein the guide sequence comprises any one of SEQ ID NOs: 2, 9, 13, 16, 22, 24, 25, 27, 30, 31, 32, 33, 35, 36, 40, 44, 45, 53, 55, 57, 60, 61-63, 65, 67, 69, 70, 71, 73, 76, 78, 79, 80, 82-84, 103, 109, 123, 133, 149, 156, and 166.
   Embodiment 181 The method or composition of any one of embodiments 1-88, wherein the guide sequence comprises any one of SEQ ID NOs: 100-102, 104-108, 110-122, 124-132, 134-148, 150-155, 157-165, and 167-192.
   Embodiment 182 The method or composition of any one of embodiments 1-88, wherein the guide sequence comprises any one of SEQ ID NOs: 1, 5, 7, 8, 14, 23, 25, 27, 32, 45, 48, 62, 66, 68, 70, 73, 75, 76, 77, 78, 80, 103, 109, 123, 133, 149, 153, 156, and 184.
   Embodiment 183 The method or composition of any one of embodiments 1-88, wherein the guide sequence comprises any one of SEQ ID NOs: 1, 5, 7, 8, 14, 23, 25, 27, 32, 45, 48, 103, and 123.
   Embodiment 184 The method or composition of any one of embodiments 1-88, wherein the guide RNA is an sgRNA comprising any one of SEQ ID NOs: 86-90.
   Embodiment 185 The method or composition of any one of embodiments 1-88, wherein the guide RNA is an sgRNA comprising SEQ ID NO: 89.
   Embodiment 186 The method or composition of any one of embodiments 1-88, wherein the guide RNA is an sgRNA comprising SEQ ID NO: 1001 or 2001.
   Embodiment 187 The method or composition of any one of embodiments 1-88, wherein the guide RNA is an sgRNA comprising SEQ ID NO: 1005 or 2005.
   Embodiment 188 The method or composition of any one of embodiments 1-88, wherein the guide RNA is an sgRNA comprising SEQ ID NO: 1007 or 2007.
   Embodiment 189 The method or composition of any one of embodiments 1-88, wherein the guide RNA is an sgRNA comprising SEQ ID NO: 1008 or 2008.
   Embodiment 190 The method or composition of any one of embodiments 1-88, wherein the guide RNA is an sgRNA comprising SEQ ID NO: 1014 or 2014.
   Embodiment 191 The method or composition of any one of embodiments 1-88, wherein the guide RNA is an sgRNA comprising SEQ ID NO: 1023 or 2023.
   Embodiment 192 The method or composition of any one of embodiments 1-88, wherein the guide RNA is an sgRNA comprising SEQ ID NO: 1027 or 2027.
   Embodiment 193 The method or composition of any one of embodiments 1-88, wherein the guide RNA is an sgRNA comprising SEQ ID NO: 1032 or 2032.
   Embodiment 194 The method or composition of any one of embodiments 1-88, wherein the guide RNA is an sgRNA comprising SEQ ID NO: 1045 or 2045.
   Embodiment 195 The method or composition of any one of embodiments 1-88, wherein the guide RNA is an sgRNA comprising SEQ ID NO: 1048 or 2048.
   Embodiment 196 The method or composition of any one of embodiments 1-88, wherein the guide RNA is an sgRNA comprising SEQ ID NO: 1063 or 2063.
   Embodiment 197 The method or composition of any one of embodiments 1-88, wherein the guide RNA is an sgRNA comprising SEQ ID NO: 1067 or 2067.
   Embodiment 198 The method or composition of any one of embodiments 1-88, wherein the guide RNA is an sgRNA comprising SEQ ID NO: 1069 or 2069.
   Embodiment 199 The method or composition of any one of embodiments 1-88, wherein the guide RNA is an sgRNA comprising SEQ ID NO: 1071 or 2071.
   Embodiment 200 The method or composition of any one of embodiments 1-88, wherein the guide RNA is an sgRNA comprising SEQ ID NO: 1074 or 2074.
   Embodiment 201 The method or composition of any one of embodiments 1-88, wherein the guide RNA is an sgRNA comprising SEQ ID NO: 1076 or 2076.
   Embodiment 202 The method or composition of any one of embodiments 1-88, wherein the guide RNA is an sgRNA comprising SEQ ID NO: 1077 or 2077.
   Embodiment 203 The method or composition of any one of embodiments 1-88, wherein the guide RNA is an sgRNA comprising SEQ ID NO: 1078 or 2078.
   Embodiment 204 The method or composition of any one of embodiments 1-88, wherein the guide RNA is an sgRNA comprising SEQ ID NO: 1079 or 2079.
   Embodiment 205 The method or composition of any one of embodiments 1-88, wherein the guide RNA is an sgRNA comprising SEQ ID NO: 1081 or 2081.
   Embodiment 206 The method or composition of any one of embodiments 1-205, wherein the composition is administered as a single dose.
   Embodiment 207 The method or composition of any one of embodiments 1-206, wherein the composition is administered one time.
   Embodiment 208 The method or composition of any one of embodiments 206 or 207, wherein the single dose or one time administration:
[0196] a. induces a DSB; and/or
[0197] b. reduces expression of LDHA gene; and/or
[0198] c. treats or prevents hyperoxaluria; and/or
[0199] d. treats or prevents ESRD caused by hyperoxaluria; and/or
[0200] e. treats or prevents calcium oxalate production and deposition; and/or
[0201] f. treats or prevents primary hyperoxaluria (including PH1, PH2, and PH3); and/or
[0202] g. treats or prevents oxalosis; and/or
[0203] h. treats and prevents hematuria; and/or
[0204] i. treats or prevents enteric hyperoxaluria; and/or
[0205] j. treats or prevents hyperoxaluria related to eating high-oxalate foods; and/or
[0206] k. delays or ameliorates the need for kidney or liver transplant; and/or
[0207] l. increases serum glycolate concentration; and/or
[0208] m. reduces oxylate in urine.
   Embodiment 209 The method or composition of embodiment 208, wherein the single dose or one time administration achieves any one or more of a)-m) for 3, 4, 5, 6, 7, 8, 9, 10, 11, 12, 13, 14, or 15 weeks.
   Embodiment 210 The method or composition of embodiment 208, wherein the single dose or one time administration achieves a durable effect.
   Embodiment 211 The method or composition of any one of embodiments 1-208, further comprising achieving a durable effect.
   Embodiment 212 The method or composition of embodiment 210 or 211, wherein the durable effect persists at least 1 month, at least 3 months, at least 6 months, at least one year, or at least 5 years.
   Embodiment 213 The method or composition of any one of embodiments 1-212, wherein administration of the composition results in a therapeutically relevant reduction of oxalate in urine.
   Embodiment 214 The method or composition of any one of embodiments 1-213, wherein administration of the composition results in urinary oxalate levels within a therapeutic range.
   Embodiment 215 The method or composition of any one of embodiments 1-214, wherein administration of the composition results in oxalate levels within 100, 120, or 150% of normal range.
   Embodiment 216 Use of a composition or formulation of any of embodiments 9-215 for the preparation of a medicament for treating a human subject having hyperoxaluria.

[0209] Also disclosed is the use of a composition or formulation of any of the foregoing embodiments for the preparation of a medicament for treating a human subject having hyperoxaluria. Also disclosed are any of the foregoing compositions or formulations for use in treating hyperoxaluria or for use in modifying (e.g., forming an indel in, or forming a frameshift or nonsense mutation in) a LDHA gene.

### BRIEF DESCRIPTION OF THE DRAWINGS

[0210] FIG. 1 shows off-target analysis of certain sgRNAs targeting LDHA.

[0211] FIG. 2 shows dose response curves of editing % of certain sgRNAs targeting LDHA in PHH.

[0212] FIG. 3 shows dose response curves of editing % of certain sgRNAs targeting LDHA in PCH.

[0213] FIG. 4 shows Western Blot analysis of LDHA-targeted modified sgRNAs (listed in Table 2) in PHH.

[0214] FIG. 5 shows urine oxalate levels after treatment with LNPs comprising a modified sgRNAs in vivo in AGT-deficient mice.

[0215] FIG. 6 shows urine oxalate levels after treatment with LNPs comprising a modified sgRNA in vivo in AGT-deficient mice in a 15-week study.

[0216] FIG. 7 shows Western Blot analysis after treatment with LNPs comprising a modified sgRNA in vivo in AGT-deficient mice in a 15-week study.

[0217] FIG. 8 shows immunohistochemical staining of LDHA protein in vivo in livers of AGT-deficient mice.

[0218] FIG. 9 shows the correlation between the editing and protein levels depicted in Table 19.

[0219] FIG. 10 labels the 10 conserved region YA sites in an exemplary sgRNA sequence from 1 to 10 (SEQ ID NO: 2082). The numbers 25, 45, 50, 56, 64, 67, and 83 indicate the position of the pyrimidine of YA sites 1, 5, 6, 7, 8, 9, and 10 in an sgRNA with a guide region indicated as (N)x, e.g., wherein x is optionally 20.

[0220] FIG. 11 shows an exemplary sgRNA (SEQ ID NO: 401; not all modifications are shown) in a possible secondary structure with labels designating individual nucleotides of the conserved region of the sgRNA, including the lower stem, bulge, upper stem, nexus (the nucleotides of which can be referred to as N1 through N18, respectively, in the 5′ to 3′ direction), hairpin 1, and hairpin 2 regions. A nucleotide between hairpin 1 and hairpin 2 is labeled n. A guide region may be present on an sgRNA and is indicated in this figure as “(N)x” preceding the conserved region of the sgRNA.

[0221] FIGS. 12A-12C show dose response curves of percent editing of certain sgRNAs targeting LDHA in primary cynomologous hepatocytes.

[0222] FIGS. 13A-13B show dose response curves of relative reduction in LDHA expression after lipofection treatment comprising certain sgRNAs in primary human and cynomolgus hepatocytes.

[0223] FIGS. 14A-14C show dose-dependent urine oxalate levels, percent editing, and correlation between the urine oxalate levels and percent editing, respectively, after treatment with LNPs comprising a certain sgRNA of AGT-deficient mice.

[0224] FIGS. 15A-15B show LDHA activity in liver and muscle samples after treatment with LNPs comprising a certain sgRNA of AGT-deficient mice in the 15-week durability study as described in Example 4.

[0225] FIGS. 16A-16B show pyruvate levels in liver and plasma samples, after treatment with LNPs comprising a certain sgRNA of AGT-deficient mice in the 15-week durability study as described in Example 4.

[0226] FIG. 17 shows the average plasma lactate clearance function in mice that had undergone either 5/6 nephrectomy or sham surgeries after treatment with LNPs comprising a certain sgRNA.

### DETAILED DESCRIPTION

[0227] Reference will now be made in detail to certain embodiments of the invention, examples of which are illustrated in the accompanying drawings. While the invention is described in conjunction with the illustrated embodiments, it will be understood that they are not intended to limit the invention to those embodiments. On the contrary, the invention is intended to cover all alternatives, modifications, and equivalents, which may be included within the invention as defined by the appended claims and included embodiments.

[0228] Before describing the present teachings in detail, it is to be understood that the disclosure is not limited to specific compositions or process steps, as such may vary. It should be noted that, as used in this specification and the appended claims, the singular form “a”, “an” and “the” include plural references unless the context clearly dictates otherwise. Thus, for example, reference to “a conjugate” includes a plurality of conjugates and reference to “a cell” includes a plurality of cells and the like.

[0229] Numeric ranges are inclusive of the numbers defining the range. Measured and measurable values are understood to be approximate, taking into account significant digits and the error associated with the measurement. Also, the use of “comprise”, “comprises”, “comprising”, “contain”, “contains”, “containing”, “include”, “includes”, and “including” are not intended to be limiting. It is to be understood that both the foregoing general description and detailed description are exemplary and explanatory only and are not restrictive of the teachings.

[0230] Unless specifically noted in the specification, embodiments in the specification that recite “comprising” various components are also contemplated as “consisting of” or “consisting essentially of” the recited components; embodiments in the specification that recite “consisting of” various components are also contemplated as “comprising” or “consisting essentially of” the recited components; and embodiments in the specification that recite “consisting essentially of” various components are also contemplated as “consisting of” or “comprising” the recited components (this interchangeability does not apply to the use of these terms in the claims). The term “or” is used in an inclusive sense, i.e., equivalent to “and/or,” unless the context clearly indicates otherwise.

[0231] The section headings used herein are for organizational purposes only and are not to be construed as limiting the desired subject matter in any way. In the event that any material incorporated by reference contradicts any term defined in this specification or any other express content of this specification, this specification controls. While the present teachings are described in conjunction with various embodiments, it is not intended that the present teachings be limited to such embodiments. On the contrary, the present teachings encompass various alternatives, modifications, and equivalents, as will be appreciated by those of skill in the art.

### I. Definitions

[0232] Unless stated otherwise, the following terms and phrases as used herein are intended to have the following meanings:

[0233] “Polynucleotide” and “nucleic acid” are used herein to refer to a multimeric compound comprising nucleosides or nucleoside analogs which have nitrogenous heterocyclic bases or base analogs linked together along a backbone, including conventional RNA, DNA, mixed RNA-DNA, and polymers that are analogs thereof. A nucleic acid “backbone” can be made up of a variety of linkages, including one or more of sugar-phosphodiester linkages, peptide-nucleic acid bonds (“peptide nucleic acids” or PNA; PCT No. WO 95/32305), phosphorothioate linkages, methylphosphonate linkages, or combinations thereof. Sugar moieties of a nucleic acid can be ribose, deoxyribose, or similar compounds with substitutions, e.g., 2′ methoxy or 2′ halide substitutions. Nitrogenous bases can be conventional bases (A, G, C, T, U), analogs thereof (e.g., modified uridines such as 5-methoxyuridine, pseudouridine, or N1-methylpseudouridine, or others); inosine; derivatives of purines or pyrimidines (e.g., N⁴-methyl deoxyguanosine, deaza- or aza-purines, deaza- or aza-pyrimidines, pyrimidine bases with substituent groups at the 5 or 6 position (e.g., 5-methylcytosine), purine bases with a substituent at the 2, 6, or 8 positions, 2-amino-6-methylaminopurine, O⁶-methylguanine, 4-thio-pyrimidines, 4-amino-pyrimidines, 4-dimethylhydrazine-pyrimidines, and O⁴-alkyl-pyrimidines; U.S. Pat. No. 5,378,825 and PCT No. WO 93/13121). For general discussion see The Biochemistry of the Nucleic Acids 5-36, Adams et al., ed., 11^{th} ed., 1992). Nucleic acids can include one or more “abasic” residues where the backbone includes no nitrogenous base for position(s) of the polymer (U.S. Pat. No. 5,585,481). A nucleic acid can comprise only conventional RNA or DNA sugars, bases and linkages, or can include both conventional components and substitutions (e.g., conventional bases with 2′ methoxy linkages, or polymers containing both conventional bases and one or more base analogs). Nucleic acid includes “locked nucleic acid” (LNA), an analogue containing one or more LNA nucleotide monomers with a bicyclic furanose unit locked in an RNA mimicking sugar conformation, which enhance hybridization affinity toward complementary RNA and DNA sequences (Vester and Wengel, 2004, Biochemistry 43(42):13233-41). RNA and DNA have different sugar moieties and can differ by the presence of uracil or analogs thereof in RNA and thymine or analogs thereof in DNA.

[0234] “Guide RNA”, “gRNA”, and “guide” are used herein interchangeably to refer to either a crRNA (also known as CRISPR RNA), or the combination of a crRNA and a trRNA (also known as tracrRNA). The crRNA and trRNA may be associated as a single RNA molecule (single guide RNA, sgRNA) or in two separate RNA molecules (dual guide RNA, dgRNA). “Guide RNA” or “gRNA” refers to each type. The trRNA may be a naturally-occurring sequence, or a trRNA sequence with modifications or variations compared to naturally-occurring sequences.

[0235] As used herein, a “guide sequence” refers to a sequence within a guide RNA that is complementary to a target sequence and functions to direct a guide RNA to a target sequence for binding or modification (e.g., cleavage) by an RNA-guided DNA binding agent. A “guide sequence” may also be referred to as a “targeting sequence,” or a “spacer sequence.” A guide sequence can be 20 base pairs in length, e.g., in the case of Streptococcus pyogenes (i.e., Spy Cas9) and related Cas9 homologs/orthologs. Shorter or longer sequences can also be used as guides, e.g., 15-, 16-, 17-, 18-, 19-, 21-, 22-, 23-, 24-, or 25-nucleotides in length. For example, in some embodiments, the guide sequence comprises at least 17, 18, 19, or 20 contiguous nucleotides of a sequence selected from SEQ ID NOs:1-84. In some embodiments, the target sequence is in a gene or on a chromosome, for example, and is complementary to the guide sequence. In some embodiments, the degree of complementarity or identity between a guide sequence and its corresponding target sequence may be about 75%, 80%, 85%, 90%, 95%, 96%, 97%, 98%, 99%, or 100%. For example, in some embodiments, the guide sequence comprises a sequence with about 75%, 80%, 85%, 90%, 95%, 96%, 97%, 98%, 99%, or 100% identity to at least 17, 18, 19, or 20 contiguous nucleotides of a sequence selected from SEQ ID NOs:1-84. In some embodiments, the guide sequence and the target region may be 100% complementary or identical. In other embodiments, the guide sequence and the target region may contain at least one mismatch. For example, the guide sequence and the target sequence may contain 1, 2, 3, or 4 mismatches, where the total length of the target sequence is at least 17, 18, 19, 20 or more base pairs. In some embodiments, the guide sequence and the target region may contain 1-4 mismatches where the guide sequence comprises at least 17, 18, 19, 20 or more nucleotides. In some embodiments, the guide sequence and the target region may contain 1, 2, 3, or 4 mismatches where the guide sequence comprises 20 nucleotides.

[0236] Target sequences for RNA-guided DNA binding agents include both the positive and negative strands of genomic DNA (i.e., the sequence given and the sequence's reverse compliment), as a nucleic acid substrate for an RNA-guided DNA binding agent is a double stranded nucleic acid. Accordingly, where a guide sequence is said to be “complementary to a target sequence”, it is to be understood that the guide sequence may direct a guide RNA to bind to the reverse complement of a target sequence. Thus, in some embodiments, where the guide sequence binds the reverse complement of a target sequence, the guide sequence is identical to certain nucleotides of the target sequence (e.g., the target sequence not including the PAM) except for the substitution of U for T in the guide sequence.

[0237] As used herein, a “YA site” refers to a 5′-pyrimidine-adenine-3′ dinucleotide. A “conserved region YA site” is present in the conserved region of an sgRNA. A “guide region YA site” is present in the guide region of an sgRNA. An unmodified YA site in an sgRNA may be susceptible to cleavage by RNase-A like endonucleases, e.g., RNase A. In some embodiments, an sgRNA comprises about 10 YA sites in its conserved region. In some embodiments, an sgRNA comprises 1, 2, 3, 4, 5, 6, 7, 8, 9, or 10 YA sites in its conserved region. Exemplary conserved region YA sites are indicated in FIG. 10. Exemplary guide region YA sites are not shown in FIG. 10, as the guide region may be any sequence, including any number of YA sites. In some embodiments, an sgRNA comprises 1, 2, 3, 4, 5, 6, 7, 8, 9, or 10 of the YA sites indicated in FIG. 10. In some embodiments, an sgRNA comprises 1, 2, 3, 4, 5, 6, 7, 8, 9, or 10 YA sites at the following positions or a subset thereof: LS5-LS6; US3-US4; US9-US10; US12-B3; LS7-LS8; LS12-N1; N6-N7; N14-N15; N17-N18; and H2-2 to H2-3. In some embodiments, a YA site comprises a modification, meaning that at least one nucleotide of the YA site is modified. In some embodiments, the pyrimidine (also called the pyrimidine position) of the YA site comprises a modification (which includes a modification altering the internucleoside linkage immediately 3′ of the sugar of the pyrimidine). In some embodiments, the adenine (also called the adenine position) of the YA site comprises a modification (which includes a modification altering the internucleoside linkage immediately 3′ of the sugar of the adenine). In some embodiments, the pyrimidine position and the adenine position of the YA site comprise modifications.

[0238] As used herein, an “RNA-guided DNA binding agent” means a polypeptide or complex of polypeptides having RNA and DNA binding activity, or a DNA-binding subunit of such a complex, wherein the DNA binding activity is sequence-specific and depends on the sequence of the RNA. Exemplary RNA-guided DNA binding agents include Cas cleavases/nickases and inactivated forms thereof (“dCas DNA binding agents”). “Cas nuclease”, also called “Cas protein” as used herein, encompasses Cas cleavases, Cas nickases, and dCas DNA binding agents. Cas cleavases/nickases and dCas DNA binding agents include a Csm or Cmr complex of a type III CRISPR system, the Cas10, Csm1, or Cmr2 subunit thereof, a Cascade complex of a type I CRISPR system, the Cas3 subunit thereof, and Class 2 Cas nucleases. As used herein, a “Class 2 Cas nuclease” is a single-chain polypeptide with RNA-guided DNA binding activity, such as a Cas9 nuclease or a Cpf1 nuclease. Class 2 Cas nucleases include Class 2 Cas cleavases and Class 2 Cas nickases (e.g., H840A, D10A, or N863A variants), which further have RNA-guided DNA cleavases or nickase activity, and Class 2 dCas DNA binding agents, in which cleavase/nickase activity is inactivated. Class 2 Cas nucleases include, for example, Cas9, Cpf1, C2c1, C2c2, C2c3, HF Cas9 (e.g., N497A, R661A, Q695A, Q926A variants), HypaCas9 (e.g., N692A, M694A, Q695A, H698A variants), eSPCas9(1.0) (e.g., K810A, K1003A, R1060A variants), and eSPCas9(1.1) (e.g., K848A, K1003A, R1060A variants) proteins and modifications thereof. Cpf1 protein, Zetsche et al., Cell, 163: 1-13 (2015), is homologous to Cas9, and contains a RuvC-like nuclease domain. Cpf1 sequences of Zetsche are incorporated by reference in their entirety. See, e.g., Zetsche, Tables S1 and S3. “Cas9” encompasses Spy Cas9, the variants of Cas9 listed herein, and equivalents thereof. See, e.g., Makarova et al., Nat Rev Microbiol, 13(11): 722-36 (2015); Shmakov et al., Molecular Cell, 60:385-397 (2015).

[0239] As used herein, “ribonucleoprotein” (RNP) or “RNP complex” refers to a guide RNA together with an RNA-guided DNA binding agent, such as a Cas nuclease, e.g., a Cas cleavase, Cas nickase, or dCas DNA binding agent (e.g., Cas9). In some embodiments, the guide RNA guides the RNA-guided DNA binding agent such as Cas9 to a target sequence, and the guide RNA hybridizes with and the agent binds to the target sequence; in cases where the agent is a cleavase or nickase, binding can be followed by cleaving or nicking.

[0240] As used herein, a first sequence is considered to “comprise a sequence with at least X % identity to” a second sequence if an alignment of the first sequence to the second sequence shows that X % or more of the positions of the second sequence in its entirety are matched by the first sequence. For example, the sequence AAGA comprises a sequence with 100% identity to the sequence AAG because an alignment would give 100% identity in that there are matches to all three positions of the second sequence. The differences between RNA and DNA (generally the exchange of uridine for thymidine or vice versa) and the presence of nucleoside analogs such as modified uridines do not contribute to differences in identity or complementarity among polynucleotides as long as the relevant nucleotides (such as thymidine, uridine, or modified uridine) have the same complement (e.g., adenosine for all of thymidine, uridine, or modified uridine; another example is cytosine and 5-methylcytosine, both of which have guanosine or modified guanosine as a complement). Thus, for example, the sequence 5′-AXG where X is any modified uridine, such as pseudouridine, N1-methyl pseudouridine, or 5-methoxyuridine, is considered 100% identical to AUG in that both are perfectly complementary to the same sequence (5′-CAU). Exemplary alignment algorithms are the Smith-Waterman and Needleman-Wunsch algorithms, which are well-known in the art. One skilled in the art will understand what choice of algorithm and parameter settings are appropriate for a given pair of sequences to be aligned; for sequences of generally similar length and expected identity >50% for amino acids or >75% for nucleotides, the Needleman-Wunsch algorithm with default settings of the Needleman-Wunsch algorithm interface provided by the EBI at the www.ebi.ac.uk web server is generally appropriate.

[0241] “mRNA” is used herein to refer to a polynucleotide that is RNA or modified RNA and comprises an open reading frame that can be translated into a polypeptide (i.e., can serve as a substrate for translation by a ribosome and amino-acylated tRNAs). mRNA can comprise a phosphate-sugar backbone including ribose residues or analogs thereof, e.g., 2′-methoxy ribose residues. In some embodiments, the sugars of an mRNA phosphate-sugar backbone consist essentially of ribose residues, 2′-methoxy ribose residues, or a combination thereof.

[0242] Guide sequences useful in the guide RNA compositions and methods described herein are shown in Table 1 and throughout the application.

[0243] As used herein, “indels” refer to insertion/deletion mutations consisting of a number of nucleotides that are either inserted or deleted at the site of double-stranded breaks (DSBs) in a target nucleic acid.

[0244] As used herein, “knockdown” refers to a decrease in expression of a particular gene product (e.g., protein, mRNA, or both). Knockdown of a protein can be measured by detecting total cellular amount of the protein from a tissue or cell population of interest. Methods for measuring knockdown of mRNA are known and include sequencing of mRNA isolated from a tissue or cell population of interest. In some embodiments, “knockdown” may refer to some loss of expression of a particular gene product, for example a decrease in the amount of mRNA transcribed or a decrease in the amount of protein expressed by a population of cells (including in vivo populations such as those found in tissues).

[0245] As used herein, “knockout” refers to a loss of expression of a particular protein in a cell. Knockout can be measured either by detecting total cellular amount of a protein in a cell, a tissue or a population of cells. In some embodiments, the methods of the disclosure “knockout” LDHA in one or more cells (e.g., in a population of cells including in vivo populations such as those found in tissues). In some embodiments, a knockout is not the formation of mutant LDHA protein, for example, created by indels, but rather the complete loss of expression of LDH protein in a cell. As used herein, “LDH” refers to lactate dehydrogenase, which is the gene product of a LDHA gene. The human wild-type LDHA sequence is available at NCBI Gene ID: 3939; Ensembl ENSG00000134333.

[0246] “Hyperoxaluria” is a condition characterized by excess oxalate in the urine. Exemplary types of hyperoxaluria include primary hyperoxaluria (including types 1 (PH1), 2 (PH2), and 3 (PH3)), oxalosis, enteric hyperoxaluria, and hyperoxaluria related to eating high-oxalate foods. Hyperoxaluria may be idiopathic. High oxalate levels lead to calcium oxalate stone formation and renal parenchyma damage, which results in progressive deterioration of renal function and, eventually, end-stage renal disease. Thus, hyperoxaluria may result in excessive oxalate production and deposition of calcium oxalate crystals in the kidneys and urinary tract. Renal damage from oxalate is caused by a combination of tubular toxicity, calcium oxalate deposition in the kidneys, and urinary obstruction by calcium oxalate stones. Compromised kidney function exacerbates the disease as the excess oxalate can no longer be effectively excreted, resulting in subsequent accumulation and crystallization of oxalate in bones, eyes, skin, and heart, and other organs leading to severe illness and death. Kidney failure and end stage renal disease may occur. There are no approved pharmaceutical therapies for hyperoxaluria.

[0247] “Primary Hyperoxaluria Type 1 (PH1)” is an autosomal recessive disorder due to mutation of the AGXT gene, which encodes the liver peroxisomal alanine-glyoxylate aminotransferase (AGT) enzyme. AGT metabolizes glyoxylate to glycine. The lack of AGT activity, or its mistargeting to mitochondria, allows the oxidation of glyoxylate to oxalate, which can only be excreted in the urine.

[0248] Disrupting lactate dehydrogenase (LDH), a hepatic, peroxisomal enzyme that converts glyoxylate to oxylate before excretion by the kidney, is one possible mechanism for blocking oxalate synthesis in diseased livers, to potentially prevent the pathology that develops in hyperoxaluria. LDH, encoded by the lactate dehydrogenase gene (LDHA) gene, catalyzes the conversion of glyoxylate to oxalate. Suppression of LDH activity should inhibit oxalate production resulting in decreased urinary oxalate levels while causing an accumulation of glyoxylate that may be converted to glycolate by glyoxylate reductase/hydroxypyruvate reductase (GRHPR). Unlike oxalate, glycolate is soluble and readily excreted in the urine. Currently there are no known negative side effects of elevated glycolate levels. Thus, in some embodiments, methods for inhibiting LDH activity are provided, wherein once inhibited, oxalate production is inhibited and glycolate production is increased.

[0249] Oxalate, an oxidation product of glyoxylate, can only be excreted in the urine. High levels of oxalate in the urine (“hyperoxaluria”) is a symptom of hyperoxaluria. Thus, increased oxalate in the urine is a symptom of hyperoxaluria. Oxalate can combine with calcium to form calcium oxalate, which is the main component of kidney and bladder stones. Deposits of calcium oxalate in the kidneys and other tissues can lead to blood in the urine (hematuria), urinary tract infections, kidney damage, end stage renal disease and others. Over time, oxalate levels in the blood may rise and calcium oxalate may be deposited in other organs throughout the body (oxalosis or systemic oxalosis).

[0250] As used herein, a “target sequence” refers to a sequence of nucleic acid in a target gene that has complementarity to the guide sequence of the gRNA. The interaction of the target sequence and the guide sequence directs an RNA-guided DNA binding agent to bind, and potentially nick or cleave (depending on the activity of the agent), within the target sequence.

[0251] As used herein, “treatment” refers to any administration or application of a therapeutic for disease or disorder in a subject, and includes inhibiting the disease, arresting its development, relieving one or more symptoms of the disease, curing the disease, or preventing reoccurrence of one or more symptoms of the disease. For example, treatment of hyperoxaluria may comprise alleviating symptoms of hyperoxaluria.

[0252] The term “therapeutically relevant reduction of oxalate,” or “oxalate levels within a therapeutic range,” as used herein, means a greater than 30% reduction of urinary oxalate excretion as compared to baseline. See, Leumann and Hoppe (1999) Nephrol Dial Transplant 14:2556-2558 at 2557, second column. For example, achieving oxalate levels within a therapeutic range means reducing urinary oxalate greater than 30% from baseline. In some embodiments, a “normal oxalate level” or a “normal oxalate range” is between about 80 to about 122 μg oxalate/mg creatinine. See, Li et al. (2016) Biochim Biophys Acta 1862(2):233-239. In some embodiments, a therapeutically relevant reduction of oxalate achieves levels of less than or within 200%, 150%, 125%, 120%, 115%, 110%, 105%, or 100% of normal.

[0253] The term “about” or “approximately” means an acceptable error for a particular value as determined by one of ordinary skill in the art, which depends in part on how the value is measured or determined.

### II. Compositions

A. Compositions Comprising Guide RNA (gRNAs)

[0254] Provided herein are compositions useful for inducing a double-stranded break (DSB) within the LDHA gene, e.g., using a guide RNA with an RNA-guided DNA binding agent (e.g., a CRISPR/Cas system). The compositions may be administered to subjects having or suspected of having hyperoxaluria. The compositions may be administered to subjects having increased urinary oxalate output or decreased serum glycolate output. Guide sequences targeting the LDHA gene are shown in Table 1 at SEQ ID NOs:1-84.

[0255] Each of the guide sequences shown in Table 1 at SEQ ID NOs:1-84 and 100-192 may further comprise additional nucleotides to form a crRNA, e.g., with the following exemplary nucleotide sequence following the guide sequence at its 3′ end: GUUJUUAGAGCUAUGCUGUUUUG (SEQ ID NO: 200) in 5′ to 3′ orientation. In the case of a sgRNA, the above guide sequences may further comprise additional nucleotides to form a sgRNA, e.g., with the following exemplary nucleotide sequence following the 3′ end of the guide sequence: GUUUUAGAGCUAGAAAUAGCAAGUUAAAAUAAGGCUAGUCCGUUAUCAACUU GAAAAAGUGGCACCGAGUCGGUGCUUUU (SEQ ID NO: 201) or GUUUUAGAGCUAGAAAUAGCAAGUUAAAAUAAGGCUAGUCCGUUAUCAACUU GAAAAAGUGGCACCGAGUCGGUGC (SEQ ID NO: 203, which is SEQ ID NO: 201 without the four terminal U's) in 5′ to 3′ orientation. In some embodiments, the four terminal U's of SEQ ID NO: 201 are not present. In some embodiments, only 1, 2, or 3 of the four terminal U's of SEQ ID NO: 201 are present.

[0256] In some embodiments, LDHA short-single guide RNAs (LDHA short-sgRNAs) are provided comprising a guide sequence as described herein and a “conserved portion of an sgRNA” comprising a hairpin region, wherein the hairpin region lacks at least 5-10 nucleotides or 6-10 nucleotides. In certain embodiments, a hairpin region of the LDHA short-single guide RNAs lacks 5-10 nucleotides with reference to the conserved portion of an sgRNA, e.g. nucleotides H1-1 to H2-15 in Table 2B. In certain embodiments, a hairpin 1 region of the LDHA short-single guide RNAs lacks 5-10 nucleotides with reference to the conserved portion of an sgRNA, e.g. nucleotides H1-1 to H1-12 in Table 2B.

[0257] An exemplary “conserved portion of an sgRNA” is shown in Table 2A, which shows a “conserved region” of a S. pyogenes Cas9 (“spyCas9” (also referred to as “spCas9”)) sgRNA. The first row shows the numbering of the nucleotides, the second row shows the sequence (SEQ ID NO: 700); and the third row shows “domains.” Briner A E et al., Molecular Cell 56:333-339 (2014) describes functional domains of sgRNAs, referred to herein as “domains”, including the “spacer” domain responsible for targeting, the “lower stem”, the “bulge”, “upper stem” (which may include a tetraloop), the “nexus”, and the “hairpin 1” and “hairpin 2” domains. See, Briner et al. at page 334, FIG. 1A.

[0258] Table 2B provides a schematic of the domains of an sgRNA as used herein. In Table 2B, the “n” between regions represents a variable number of nucleotides, for example, from 0 to 1, 2, 3, 4, 5, 6, 7, 8, 9, 10, 11, 12, 13, 14, 15, 16, 17, 18, 19, 20, or more. In some embodiments, n equals 0. In some embodiments, n equals 1.

[0259] In some embodiments, the LDHA sgRNA is from S. pyogenes Cas9 (“spyCas9”) or a spyCas9 equivalent. In some embodiments, the sgRNA is not from S. pyogenes (“non-spyCas9”). In some embodiments, the 5-10 nucleotides or 6-10 nucleotides are consecutive.

[0260] In some embodiments, an LDHA short-sgRNA lacks at least nucleotides 54-58 (AAAAA) of the conserved portion of a S. pyogenes Cas9 (“spyCas9”) sgRNA, as shown in Table 2A. In some embodiments, an LDHA short-sgRNA is a non-spyCas9 sgRNA that lacks at least nucleotides corresponding to nucleotides 54-58 (AAAAA) of the conserved portion of a spyCas9 as determined, for example, by pairwise or structural alignment. In some embodiments, the non-spyCas9 sgRNA is Staphylococcus aureus Cas9 (“saCas9”) sgRNA.

[0261] In some embodiments, an LDHA short-sgRNA lacks at least nucleotides 54-61 (AAAAAGUG) of the conserved portion of a spyCas9 sgRNA. In some embodiments, an LDHA short-sgRNA lacks at least nucleotides 53-60 (GAAAAAGU) of the conserved portion of a spyCas9 sgRNA. In some embodiments, an LDHA short-sgRNA lacks 4, 5, 6, 7, or 8 nucleotides of nucleotides 53-60 (GAAAAAGU) or nucleotides 54-61 (AAAAAGUG) of the conserved portion of a spyCas9 sgRNA, or the corresponding nucleotides of the conserved portion of a non-spyCas9 sgRNA as determined, for example, by pairwise or structural alignment.

[0262] In some embodiments, the sgRNA comprises any one of the guide sequences of SEQ ID NOs: 1-146 and additional nucleotides to form a crRNA, e.g., with the following exemplary nucleotide sequence following the guide sequence at its 3′ end: GUUUUAGAGCUAGAAAUAGCAAGUUAAAAUAAGGCUAGUCCGUUAUCAACUU GGCACCGAGUCGGUGC (SEQ ID NO: 202) in 5′ to 3′ orientation. SEQ ID NO: 202 lacks 8 nucleotides with reference to a wild-type guide RNA conserved sequence:

(SEQ ID NO: 203)
GUUUUAGAGCUAGAAAUAGCAAGUUAAAAUAAGGCUAGUCCGUUAUCAA
CUUGAAAAAGUGGCACCGAGUCGGUGC.

TABLE 1
LDHA targeted guide sequences and chromosomal coordinates for human
and cynomolgus monkey

| | | Exemplary Genomic Coordinates | |
|---|---|---|---|
| | | (“Hs” indicates human; “Cyno” | |
| | | indicates cynomolgus monkey; no | SEQ |
| Guide ID | Guide Sequence | designation is human) | ID NO: |
| G012089 | ACAUAGACCUACCUUAAUCA | chr11: 18405564-18405584 | 1 |
| G012090 | AAAUAACUUAUGCUUACCAC | Hs: chr11: 18403010-18403030 | 2 |
| | | Cyno: chr14: 49278339-49278359 | |
| G012091 | AUGCAGUCAAAAGCCUCACC | chr11: 18401009-18401029 | 3 |
| G012092 | UCAGGGUCUUUACGGAAUAA | chr11: 18407112-18407132 | 4 |
| G012093 | CCUAUCAUACAGUGCUUAUG | chr11: 18405436-18405456 | 5 |
| G012094 | CCGAUUCCGUUACCUAAUGG | chr11: 18402924-18402944 | 6 |
| G012095 | UAGACCUACCUUAAUCAUGG | chr11: 18405561-18405581 | 7 |
| G012096 | UACAGAGAGUCCAAUAGCCC | chr11: 18405486-18405506 | 8 |
| G012097 | CUUUUAGUGCCUGUAUGGAG | Hs: chr11: 18403686-18403706 | 9 |
| | | Cyno: chr14: 49277655-49277675 | |
| G012098 | CCCGAUUCCGUUACCUAAUG | chr11: 18402923-18402943 | 10 |
| G012099 | GGCUGGGGCACGUCAGCAAG | chr11: 18400876-18400896 | 11 |
| G012100 | CCCCAUUAGGUAACGGAAUC | chr11: 18402926-18402946 | 12 |
| G012101 | AAGCUGGUCAUUAUCACGGC | Hs: chr11: 18400859-18400879 | 13 |
| | | Cyno: chr14: 49280125-49280145 | |
| G012103 | UACACUUUGGGGGAUCCAAA | chr11: 18407244-18407264 | 14 |
| G012104 | AUUUGAUGUCUUUUAGGACU | chr11: 18399414-18399434 | 15 |
| G012105 | CUCCAAGCUGGUCAUUAUCA | Hs: chr11: 18400855-18400875 | 16 |
| | | Cyno: chr14: 49280129-49280149 | |
| G012106 | GUCCAAUAUGGCAACUCUAA | chr11: 18396835-18396855 | 17 |
| G012107 | GGCUACACAUCCUGGGCUAU | chr11: 18405473-18405493 | 18 |
| G009440 | UACCUUCAUUAAGAUACUGA | chr11: 18396951-18396971 | 19 |
| G012108 | AGCCCGAUUCCGUUACCUAA | chr11: 18402921-18402941 | 20 |
| G012109 | GCCUUUCCCCCAUUAGGUAA | chr11: 18402933-18402953 | 21 |
| G012110 | UACGCUGGACCAAAUUAAGA | Hs: chr11: 18400909-18400929 | 22 |
| | | Cyno: chr14: 49280075-49280095 | |
| G012111 | UAUUUCUUUUAGUGCCUGUA | chr11: 18403681-18403701 | 23 |
| G012112 | AGCUGGUCAUUAUCACGGCU | Hs: chr11: 18400860-18400880 | 24 |
| | | Cyno: chr14: 49280124-49280144 | |
| G012113 | GCUGGUCAUUAUCACGGCUG | Hs: chr11: 18400861-18400881 | 25 |
| | | Cyno: chr14: 49280123-49280143 | |
| G012114 | GCUGGGGCACGUCAGCAAGA | chr11: 18400877-18400897 | 26 |
| G012115 | CUUUAUCAGUCCCUAAAUCU | Hs: chr11: 18403748-18403768 | 27 |
| | | Cyno: chr14: 49277593-49277613 | |
| G012116 | GCCCGAUUCCGUUACCUAAU | chr11: 18402922-18402942 | 28 |
| G012117 | UUUCAUCUUCAGGGUCUUUA | chr11: 18407104-18407124 | 29 |
| G012118 | ACAACUGUAAUCUUAUUCUG | Hs: chr11: 18396899-18396919 | 30 |
| | | Cyno: chr14: 49282661-49282681 | |
| G012119 | CAUUAAGAUACUGAUGGCAC | Hs: chr11: 18396945-18396965 | 31 |
| | | Cyno: chr17: 59812521-59812541 | |
| G012120 | UUUAGGGACUGAUAAAGAUA | Hs: chr11: 18403751-18403771 | 32 |
| | | Cyno: chr14: 49277590-49277610 | |
| G012121 | CUGAUAAAGAUAAGGAACAG | Hs: chr11: 18403759-18403779 | 33 |
| | | Cyno: chr14: 49277582-49277602 | |
| G012122 | UUACCUAAUGGGGGAAAGGC | chr11: 18402933-18402953 | 34 |
| G012123 | UGGAGUGGAAUGAAUGUUGC | Hs: chr11: 18403701-18403721 | 35 |
| | | Cyno: chr14: 49277640-49277660 | |
| G012124 | UCUUUAUCAGUCCCUAAAUC | Hs: chr11: 18403749-18403769 | 36 |
| | | Cyno: chr14: 49277592-49277612 | |
| G012125 | UCCGUUACCUAAUGGGGGAA | chr11: 18402929-18402949 | 37 |
| G012126 | UAUCUGCACUCUUCUUCAAA | chr11: 18407226-18407246 | 38 |
| G012127 | UACCUAAUGGGGGAAAGGCU | chr11: 18402934-18402954 | 39 |
| G012128 | AGCCGUGAUAAUGACCAGCU | Hs: chr11: 18400860-18400880 | 40 |
| | | Cyno: chr14: 49280124-49280144 | |
| G012129 | CCCCCAUUAGGUAACGGAAU | chr11: 18402927-18402947 | 41 |
| G012130 | UUUAAAAUUGCAGCUCCUUU | chr11: 18407262-18407282 | 42 |
| G012131 | GCUGAUUUAUAAUCUUCUAA | chr11: 18396862-18396882 | 43 |
| G012132 | ACAUUCAUUCCACUCCAUAC | Hs: chr11: 18403698-18403718 | 44 |
| | | Cyno: chr14: 49277643-49277663 | |
| G012133 | CCUUAAUCAUGGUGGAAACU | Hs: chr11: 18405553-18405573 | 45 |
| | | Cyno: chr12: 38488548-38488568 | |
| G012134 | ACCUUAAUCAUGGUGGAAAC | chr11: 18405554-18405574 | 46 |
| G012135 | CCUUUGCCAGAGACAAUCUU | chr11: 18399529-18399549 | 47 |
| G012136 | GAAGGUGACUCUGACUUCUG | chr11: 18407193-18407213 | 48 |
| G012137 | UAUUGGAAGCGGUUGCAAUC | chr11: 18402894-18402914 | 49 |
| G012138 | AAGUCAGAGUCACCUUCACA | chr11: 18407190-18407210 | 50 |
| G012139 | GACUCUGACUUCUGAGGAAG | chr11: 18407199-18407219 | 51 |
| G012140 | UGCAACCGCUUCCAAUAACA | chr11: 18402891-18402911 | 52 |
| G012141 | UAUUUUCUCCUUUUUCAUAG | Hs: chr11: 18402819-18402839 | 53 |
| | | Cyno: chr14: 49278530-49278550 | |
| G012142 | UUUUUUUCAUUUCAUCUUCA | chr11: 18407095-18407115 | 54 |
| G012143 | ACCAAAGUAGUCACUGUUCA | Cyno: chr14: 49274629-49274649 | 55 |
| G012145 | ACGCAGUUAAAAGGCUCACC | chr14: 49279975-49279995 | 56 |
| G012146 | UUGCUUAUUGUUUCAAAUCC | Cyno: chr14: 49279996-49280016 | 57 |
| | | Hs: chr11: 18400988-18401008 | |
| G012147 | UUCCCCCUAUAGAUUCCUUC | chr14: 49282754-49282774 | 58 |
| G012148 | UCGAGCUUUGUGGCAGUUAG | chr14: 49283162-49283182 | 59 |
| G012149 | UUGGGGUUAAUAAACCGCGA | Cyno: chr14: 49283034-49283054 | 60 |
| | | Hs: chr11: 18396528-18396548 | |
| G012150 | UGAAGGCCCAUACCUUAGCG | Cyno: chr14: 49282959-49282979 | 61 |
| | | Hs: chr11: 18396603-18396623 | |
| G012151 | CGGUUUAUUAACCCCAAGUG | Cyno: chr14: 49283037-49283057 | 62 |
| | | Hs: chr11: 18396525-18396545 | |
| G012152 | CCCAUACCUUAGCGUGGAAA | Cyno: chr14: 49282965-49282985 | 63 |
| | | Hs: chr11: 18396597-18396617 | |
| G012153 | GGCUUUUCUGCACGUACCUC | chr14: 49283141-49283161 | 64 |
| G012154 | GAAAAGGAAUAUCGACGUUU | Cyno: chr14: 49282981-49283001 | 65 |
| | | Hs: chr11: 18396581-18396601 | |
| G012155 | ACCGCGAUGGGUGAGCCCUC | chr14: 49283021-49283041 | 66 |
| G012156 | GCGGUUUAUUAACCCCAAGU | Cyno: chr14: 49283036-49283056 | 67 |
| | | Hs: chr11: 18396526-18396546 | |
| G012157 | ACCGCACGCUUCAGUGCCUU | chr14: 49283186-49283206 | 68 |
| G012158 | GGAAAAGGAAUAUCGACGUU | Cyno: chr14: 49282980-49283000 | 69 |
| | | Hs: chr11: 18396582-18396602 | |
| G012159 | GUGUAAGUAUAGCCUCCUGA | Cyno: chr14: 49283003-49283023 | 70 |
| | | Hs: chr11: 18396559-18396579 | |
| G012160 | GAUAUUCCUUUUCCACGCUA | Cyno: chr14: 49282974-49282994 | 71 |
| | | Hs: chr11: 18396588-18396608 | |
| G012161 | GCGAUGGGUGAGCCCUCAGG | chr14: 49283018-49283038 | 72 |
| G012162 | GGAAAGGCCAGCCCCACUUG | Cyno: chr14: 49283051-49283071 | 73 |
| | | Hs: chr11: 18396511-18396531 | |
| G012163 | CACCGCACGCUUCAGUGCCU | chr14: 49283187-49283207 | 74 |
| G012164 | UGCCACAAAGCUCGAGCCCA | chr14: 49283167-49283187 | 75 |
| G012165 | GGUGUAAGUAUAGCCUCCUG | Cyno: chr14: 49283002-49283022 | 76 |
| | | Hs: chr11: 18396560-18396580 | |
| G012166 | UCCUGAGGGCUCACCCAUCG | chr14: 49283017-49283037 | 77 |
| G012167 | AGGAAAGGCCAGCCCCACUU | Cyno: chr14: 49283052-49283072 | 78 |
| | | Hs: chr11: 18396510-18396530 | |
| G012168 | UUAUUAACCCCAAGUGGGGC | Cyno: chr14: 49283041-49283061 | 79 |
| | | Hs: chr11: 18396521-18396541 | |
| G012169 | GAGGAAAGGCCAGCCCCACU | Cyno: chr14: 49283053-49283073 | 80 |
| | | Hs: chr11: 18396509-18396529 | |
| G012170 | GCUCAAAGUGAUCUUGUCUG | chr14: 49283072-49283092 | 81 |
| G012171 | CCUGGCUGUGUCCUUGCUGU | Cyno: chr14: 49283105-49283125 | 82 |
| | | Hs: chr11: 18396457-18396477 | |
| G012172 | CGCGGUUUAUUAACCCCAAG | Cyno: chr14: 49283035-49283055 | 83 |
| | | Hs: chr11: 18396527-18396547 | |
| G012173 | UGGGGUUAAUAAACCGCGAU | Cyno: chr14: 49283033-49283053 | 84 |
| | | Hs: chr11: 18396529-18396549 | |
| G015538 | UUUCCCAAAAACCGUGUUAU | Cyno: chr14: 49278472-49278492 | 100 |
| G015539 | GAAAGAGGUUCACAAGCAGG | Cyno: chr14: 49277560-49277580 | 101 |
| G015540 | GUGGAAAGAGGUUCACAAGC | Cyno: chr14: 49277563-49277583 | 102 |
| G015541 | GAGAUGAUGGAUCUCCAACA | Cyno: chr12: 38487918-38487938 | 103 |
| | | Hs: chr11: 18399484-18399504 | |
| G015542 | UAAGGAAAAGGCUGCCAUGU | Cyno: chr17: 59812615-59812635 | 104 |
| G015543 | UGUAACUGCAAACUCCAAGC | Cyno: chr14: 49280141-49280161 | 105 |
| G015544 | CUUCCAAUAACACGGUUUUU | Cyno: chr14: 49278466-49278486 | 106 |
| G015545 | AAAAACCGUGUUAUUGGAAG | Cyno: chr14: 49278466-49278486 | 107 |
| G015546 | GUUCACCCAUUAAGCUGUCA | Cyno: chr14: 49278391-49278411 | 108 |
| G015547 | UUCACCCAUUAAGCUGUCAU | Cyno: chr14: 49278390-49278410 | 109 |
| | | Hs: chr11: 18402959-18402979 | |
| G015548 | ACCCAUUAAGCUGUCAUGGG | Cyno: chr14: 49278387-49278407 | 110 |
| G015549 | UGGAAUCUCCAUGUUCCCCA | Cyno: chr14: 49278359-49278379 | 111 |
| G015550 | AGAGUAUAAUGAAGAAUCUU | Cyno: chr12: 38488514-38488534 | 112 |
| G015551 | GCUGAUUCAUAAUCUUCUAA | Cyno: chr14: 49282698-49282718 | 113 |
| G015552 | CAAAUUGAAGGGAGAGAUGA | Cyno: chr12: 38487905-38487925 | 114 |
| G015553 | UCUUUGGUGUUCUAAGGAAA | Cyno: chr12: 38487947-38487967 | 115 |
| G015554 | CAAUAAGCAACUUGCAGUUC | Cyno: chr14: 49280006-49280026 | 116 |
| G015555 | ACAAUAAGCAACUUGCAGUU | Cyno: chr14: 49280005-49280025 | 117 |
| G015556 | GCUUAUUGUUUCAAAUCCAG | Cyno: chr12: 38488136-38488156 | 118 |
| G015557 | ACUUCCAAUAACACGGUUUU | Cyno: chr14: 49278465-49278485 | 119 |
| G015558 | CCCAUUAAGCUGUCAUGGGU | Cyno: chr14: 49278386-49278406 | 120 |
| G015559 | UCCACUCCAUACAGGCACAC | Cyno: chr12: 38488327-38488347 | 121 |
| G015560 | AAGACUCUGCACCCAGAUUU | Cyno: chr14: 49277607-49277627 | 122 |
| G015561 | AGACUCUGCACCCAGAUUUA | Cyno: chr14: 49277606-49277626 | 123 |
| | | Hs: chr11: 18403735-18403755 | |
| G015562 | CCAGUUUCCACCAUGAUUAA | Cyno: chr12: 38488546-38488566 | 124 |
| G015563 | ACCAUGAUUAAGGGUCUCUA | Cyno: chr12: 38488555-38488575 | 125 |
| G015564 | AUAGAGACCCUUAAUCAUGG | Cyno: chr12: 38488556-38488576 | 126 |
| G015565 | UCCAUAGAGACCCUUAAUCA | Cyno: chr12: 38488559-38488579 | 127 |
| G015566 | UAAGGGUCUCUAUGGAAUAA | Cyno: chr12: 38488563-38488583 | 128 |
| G015567 | AGAUAAGGAACAGUGGAAAG | Cyno: chr14: 49277575-49277595 | 129 |
| G015568 | CAGAAUAAGAUUACAGUUGU | Cyno: chr14: 49282661-49282681 | 130 |
| G015569 | AGAAUAAGAUUACAGUUGUU | Cyno: chr14: 49282660-49282680 | 131 |
| G015570 | AACAACUGUAAUCUUAUUCU | Cyno: chr14: 49282660-49282680 | 132 |
| G015571 | GAAUAAGAUUACAGUUGUUG | Cyno: chr14: 49282659-49282679 | 133 |
| | | Hs: chr11: 18396901-18396921 | |
| G015572 | CAACAACUGUAAUCUUAUUC | Cyno: chr14: 49282659-49282679 | 134 |
| G015573 | AAGAUUACAGUUGUUGGGGU | Cyno: chr14: 49282655-49282675 | 135 |
| G015574 | GUUGUUGGGGUUGGUGCUGU | Cyno: chr14: 49282646-49282666 | 136 |
| G015575 | UGCCAUCAGUAUCUUAAUGA | Cyno: chr17: 59812522-59812542 | 137 |
| G015576 | GUCCUUCAUUAAGAUACUGA | Cyno: chr17: 59812527-59812547 | 138 |
| G015577 | CAGUAUCUUAAUGAAGGACU | Cyno: chr17: 59812528-59812548 | 139 |
| G015578 | UGUCAUCGAAGACAAAUUGA | Cyno: chr12: 38487893-38487913 | 140 |
| G015579 | GUCAUCGAAGACAAAUUGAA | Cyno: chr12: 38487894-38487914 | 141 |
| G015580 | AGACAAUCUUUGGUGUUCUA | Cyno: chr12: 38487953-38487973 | 142 |
| G015581 | AGAACACCAAAGAUUGUCUC | Cyno: chr12: 38487954-38487974 | 143 |
| G015582 | GGCUGGGGCACGUCAACAAG | Cyno: chr14: 49280108-49280128 | 144 |
| G015583 | GCUGGGGCACGUCAACAAGA | Cyno: chr14: 49280107-49280127 | 145 |
| G015584 | GGGAGAAAGCCGUCUUAAUU | Cyno: chr14: 49280087-49280107 | 146 |
| G015585 | UAAAGAUGUUCACGUUACGC | Cyno: chr14: 49280060-49280080 | 147 |
| G015586 | GGGCUGUAUUUUACAACAUU | Cyno: chr14: 49280026-49280046 | 148 |
| G015587 | UACGUGGCUUGGAAGAUAAG | Cyno: chr14: 49278496-49278516 | 149 |
| | | Hs: chr11: 18402853-18402873 | |
| G015588 | ACUUAUCUUCCAAGCCACGU | Cyno: chr14: 49278495-49278515 | 150 |
| G015589 | UGCAACCACUUCCAAUAACA | Cyno: chr14: 49278458-49278478 | 151 |
| G015590 | AGCCAGAUUCCGUUACCUGA | Cyno: chr14: 49278428-49278448 | 152 |
| G015591 | GCCAGAUUCCGUUACCUGAU | Cyno: chr14: 49278427-49278447 | 153 |
| G015592 | CCAGAUUCCGUUACCUGAUG | Cyno: chr14: 49278426-49278446 | 154 |
| G015593 | CCCCAUCAGGUAACGGAAUC | Cyno: chr14: 49278423-49278443 | 155 |
| G015594 | CCCACCCAUGACAGCUUAAU | Cyno: chr14: 49278383-49278403 | 156 |
| | | Hs: chr11: 18402966-18402986 | |
| G015595 | ACCCACCCAUGACAGCUUAA | Cyno: chr14: 49278382-49278402 | 157 |
| G015596 | AGCUGUCAUGGGUGGGUCCU | Cyno: chr14: 49278379-49278399 | 158 |
| G015597 | GCUGUCAUGGGUGGGUCCUU | Cyno: chr14: 49278378-49278398 | 159 |
| G015598 | CUGUCAUGGGUGGGUCCUUG | Cyno: chr14: 49278377-49278397 | 160 |
| G015599 | GGGUGGGUCCUUGGGGAACA | Cyno: chr14: 49278370-49278390 | 161 |
| G015600 | GAGAUUCCAGUGUGCCUGUA | Cyno: chr12: 38488318-38488338 | 162 |
| G015601 | UCCAGUGUGCCUGUAUGGAG | Cyno: chr12: 38488323-38488343 | 163 |
| G015602 | AUCUGGGUGCAGAGUCUUCA | Cyno: chr14: 49277609-49277629 | 164 |
| G015603 | AAUCUGGGUGCAGAGUCUUC | Cyno: chr14: 49277608-49277628 | 165 |
| G015604 | UAUGAGGUGAUCAAACUCAA | Cyno: chr12: 38488447-38488467 | 166 |
| | | Hs: chr11: 18405452-18405472 | |
| G015605 | UGGACUCUCUGUAGCAGAUU | Cyno: chr12: 38488488-38488508 | 167 |
| G015606 | CCCAGUUUCCACCAUGAUUA | Cyno: chr12: 38488545-38488565 | 168 |
| G015607 | UGGGGUUGGUGCUGUUGGCA | Cyno: chr12: 38487815-38487835 | 169 |
| G015608 | GAACACCAAAGAUUGUCUCU | Cyno: chr17: 59812635-59812655 | 170 |
| G015609 | CAGAUUCCGUUACCUGAUGG | Cyno: chr14: 49278425-49278445 | 171 |
| G015610 | UUACCUGAUGGGGGAAAGAC | Cyno: chr14: 49278416-49278436 | 172 |
| G015611 | GUCUUUCCCCCAUCAGGUAA | Cyno: chr14: 49278416-49278436 | 173 |
| G015612 | UACCUGAUGGGGGAAAGACU | Cyno: chr14: 49278415-49278435 | 174 |
| G015613 | CUCCCAGUCUUUCCCCCAUC | Cyno: chr14: 49278410-49278430 | 175 |
| G015614 | AACUCAAAGGCUACACAUCC | Cyno: chr17: 59813145-59813165 | 176 |
| G015615 | ACUCAAAGGCUACACAUCCU | Cyno: chr17: 59813146-59813166 | 177 |
| G015616 | GGCUACACAUCCUGGGCCAU | Cyno: chr17: 59813153-59813173 | 178 |
| G015617 | UACAGAGAGUCCAAUGGCCC | Cyno: chr17: 59813166-59813186 | 179 |
| G015618 | AUCUGCUACAGAGAGUCCAA | Cyno: chr17: 59813172-59813192 | 180 |
| G015619 | CCCUUAAUCAUGGUGGAAAC | Cyno: chr12: 38488549-38488569 | 181 |
| G015620 | CCUUGCAUUUUGGGACAGAA | Cyno: chr17: 59813291-59813311 | 182 |
| G015621 | CCAUUCUGUCCCAAAAUGCA | Cyno: chr17: 59813294-59813314 | 183 |
| G015622 | AGUGGAUAUCUUGACCUACG | Cyno: chr14: 49278512-49278532 | 184 |
| G015623 | AUAUCUUGACCUACGUGGCU | Cyno: chr14: 49278507-49278527 | 185 |
| G015624 | UAUUGGAAGUGGUUGCAAUC | Cyno: chr14: 49278455-49278475 | 186 |
| G015625 | UCUUUCCCAGAGACAAUCUU | Cyno: chr17: 59812643-59812663 | 187 |
| G015626 | GGUGGUUGAGAGUGCUUAUG | Cyno: chr17: 59813116-59813136 | 188 |
| G015627 | CCUCAGUGUUCCUUGCAUUU | Cyno: chr17: 59813281-59813301 | 189 |
| G015628 | CUCAGUGUUCCUUGCAUUUU | Cyno: chr17: 59813282-59813302 | 190 |
| G015629 | CCAAAAUGCAAGGAACACUG | Cyno: chr17: 59813284-59813304 | 191 |
| G015630 | ACGUAGGUCAAGAUAUCCAC | Cyno: chr12: 38488155-38488175 | 192 |

TABLE 2
LDHA targeted gRNA and sgRNA nomenclature and sequence

| | Guide | | | | |
|---|---|---|---|---|---|
| Guide ID | ID | | SEQ ID | | SEQ ID |
| (sgRNA) | (crRNA) | sgRNA Sequence-unmodified | NO | sgRNA Sequence-modified | NO |
| G012089 | CR0011780 | ACAUAGACCUACCUUAAUCAGUUUUAGAGCUAGAAA | 1001 | mA*mC*mA*UAGACCUACCUUAAUCAGUUUUAGAmGmCmUmAmGmAmAm | 2001 |
| | | UAGCAAGUUAAAAUAAGGCUAGUCCGUUAUCAACUU | | AmUmAmGmCAAGUUAAAAUAAGGCUAGUCCGUUAUCAmAmCmUmUmGmA | |
| | | GAAAAAGUGGCACCGAGUCGGUGCUUUU | | mAmAmAmAmGmUmGmGmCmAmCmCmGmAmGmUmCmGmGmUmGmCmU*mU | |
| | | | | *mU*mU | |
| G012093 | CR0011784 | CCUAUCAUACAGUGCUUAUGGUUUUAGAGCUAGAAA | 1005 | mC*mC*mU*AUCAUACAGUGCUUAUGGUUUUAGAmGmCmUmAmGmAmAm | 2005 |
| | | UAGCAAGUUAAAAUAAGGCUAGUCCGUUAUCAACUU | | AmUmAmGmCAAGUUAAAAUAAGGCUAGUCCGUUAUCAmAmCmUmUmGmA | |
| | | GAAAAAGUGGCACCGAGUCGGUGCUUUU | | mAmAmAmAmGmUmGmGmCmAmCmCmGmAmGmUmCmGmGmUmGmCmU*mU | |
| | | | | *mU*mU | |
| G012095 | CR0011786 | UAGACCUACCUUAAUCAUGGGUUUUAGAGCUAGAAA | 1007 | mU*mA*mG*ACCUACCUUAAUCAUGGGUUUUAGAmGmCmUmAmGmAmAm | 2007 |
| | | UAGCAAGUUAAAAUAAGGCUAGUCCGUUAUCAACUU | | AmUmAmGmCAAGUUAAAAUAAGGCUAGUCCGUUAUCAmAmCmUmUmGmA | |
| | | GAAAAAGUGGCACCGAGUCGGUGCUUUU | | mAmAmAmAmGmUmGmGmCmAmCmCmGmAmGmUmCmGmGmUmGmCmU*mU | |
| | | | | *mU*mU | |
| G012096 | CR0011787 | UACAGAGAGUCCAAUAGCCCGUUUUAGAGCUAGAAA | 1008 | mU*mA*mC*AGAGAGUCCAAUAGCCCGUUUUAGAmGmCmUmAmGmAmAm | 2008 |
| | | UAGCAAGUUAAAAUAAGGCUAGUCCGUUAUCAACUU | | AmUmAmGmCAAGUUAAAAUAAGGCUAGUCCGUUAUCAmAmCmUmUmGmA | |
| | | GAAAAAGUGGCACCGAGUCGGUGCUUUU | | mAmAmAmAmGmUmGmGmCmAmCmCmGmAmGmUmCmGmGmUmGmCmU*mU | |
| | | | | *mU*mU | |
| G012103 | CR0011793 | UACACUUUGGGGGAUCCAAAUUUUAGAGCUAGAAAU | 1014 | mU*mA*mC*ACUUUGGGGGAUCCAAAGUUUUAGAmGmCmUmAmGmAmAm | 2014 |
| | | AGCAAGUUAAAAUAAGGCUAGUCCGUUAUCAACUUG | | AmUmAmGmCAAGUUAAAAUAAGGCUAGUCCGUUAUCAmAmCmUmUmGmA | |
| | | AAAAAGUGGCACCGAGUCGGUGCUUUU | | mAmAmAmAmGmUmGmGmCmAmCmCmGmAmGmUmCmGmGmUmGmCmU*mU | |
| | | | | *mU*mU | |
| G012111 | CR0011801 | UAUUUCUUUUAGUGCCUGUAGUUUUAGAGCUAGAAA | 1023 | mU*mA*mU*UUCUUUUAGUGCCUGUAGUUUUAGAmGmCmUmAmGmAmAm | 2023 |
| | | UAGCAAGUUAAAAUAAGGCUAGUCCGUUAUCAACUU | | AmUmAmGmCAAGUUAAAAUAAGGCUAGUCCGUUAUCAmAmCmUmUmGmA | |
| | | GAAAAAGUGGCACCGAGUCGGUGCUUUU | | mAmAmAmAmGmUmGmGmCmAmCmCmGmAmGmUmCmGmGmUmGmCmU*mU | |
| | | | | *mU*mU | |
| G012115 | CR0011805 | CUUUAUCAGUCCCUAAAUCUUUUUAGAGCUAGAAAU | 1027 | mC*mU*mU*UUUAUCAGUCCCUAAAUCUGUUUUAGAmGmCmUmAmGmAm | 2027 |
| | | AGCAAGUUAAAAUAAGGCUAGUCCGUUAUCAACUUG | | AmAmUmAmGmCAAGUUAAAAUAAGGCUAGUCCGUUAUCAmAmCmUmUmG | |
| | | AAAAAGUGGCACCGAGUCGGUGCUUUU | | mAmAmAmAmAmGmUmGmGmCmAmCmCmGmAmGmUmCmGmGmUmGmCmU* | |
| | | | | mU*mU*mU | |
| G012120 | CR0011810 | UUUAGGGACUGAUAAAGAUAUUUUAGAGCUAGAAAU | 1032 | mU*mU*mU*AGGGACUGAUAAAGAUAGUUUUAGAmGmCmUmAmGmAmAm | 2032 |
| | | AGCAAGUUAAAAUAAGGCUAGUCCGUUAUCAACUUG | | AmUmAmGmCAAGUUAAAAUAAGGCUAGUCCGUUAUCAmAmCmUmUmGmA | |
| | | AAAAAGUGGCACCGAGUCGGUGCUUUU | | mAmAmAmAmGmUmGmGmCmAmCmCmGmAmGmUmCmGmGmUmGmCmU*mU | |
| | | | | *mU*mU | |
| G012133 | CR0011823 | CCUUAAUCAUGGUGGAAACUUUUUAGAGCUAGAAAU | 1045 | mC*mC*mU*UAAUCAUGGUGGAAACUGUUUUAGAmGmCmUmAmGmAmAm | 2045 |
| | | AGCAAGUUAAAAUAAGGCUAGUCCGUUAUCAACUUG | | AmUmAmGmCAAGUUAAAAUAAGGCUAGUCCGUUAUCAmAmCmUmUmGmA | |
| | | AAAAAGUGGCACCGAGUCGGUGCUUUU | | mAmAmAmAmGmUmGmGmCmAmCmCmGmAmGmUmCmGmGmUmGmCmU*mU | |
| | | | | *mU*mU | |
| G012136 | CR0011826 | GAAGGUGACUCUGACUUCUGGUUUUAGAGCUAGAAA | 1048 | mG*mA*mA*GGUGACUCUGACUUCUGUUUUAGAmGmCmUmAmGmAmAmA | 2048 |
| | | UAGCAAGUUAAAAUAAGGCUAGUCCGUUAUCAACUU | | mUmAmGmCAAGUUAAAAUAAGGCUAGUCCGUUAUCAmAmCmUmUmGmAm | |
| | | GAAAAAGUGGCACCGAGUCGGUGCUUUU | | AmAmAmAmGmUmGmGmCmAmCmCmGmAmGmUmCmGmGmUmGmCmU*mU* | |
| | | | | mU*mU | |
| G012151 | CR0011840 | CGGUUUAUUAACCCCAAGUGGUUUUAGAGCUAGAAA | 1063 | mC*mG*mG*UUUAUUAACCCCAAGUG | 2063 |
| | | UAGCAAGUUAAAAUAAGGCUAGUCCGUUAUCAACUU | | GUUUUAGAmGmCmUmAmGmAmAmAmUmAmGmCAAGUUAAAAUAAGGCUA | |
| | | GAAAAAGUGGCACCGAGUCGGUGCUUUU | | GUCCGUUAUCAmAmCmUmUmGmAmAmAmAmAmGmUmGmGmCmAmCmCmG | |
| | | | | mAmGmUmCmGmGmUmGmCmU*mU*mU*mU | |
| G012155 | CR0011844 | ACCGCGAUGGGUGAGCCCUCGUUUUAGAGCUAGAAA | 1067 | mA*mC*mC*GCGAUGGGUGAGCCCUC | 2067 |
| | | UAGCAAGUUAAAAUAAGGCUAGUCCGUUAUCAACUU | | GUUUUAGAmGmCmUmAmGmAmAmAmUmAmGmCAAGUUAAAAUAAGGCUA | |
| | | GAAAAAGUGGCACCGAGUCGGUGCUUUU | | GUCCGUUAUCAmAmCmUmUmGmAmAmAmAmAmGmUmGmGmCmAmCmCmG | |
| | | | | mAmGmUmCmGmGmUmGmCmU*mU*mU*mU | |
| G012157 | CR0011846 | ACCGCACGCUUCAGUGCCUUGUUUUAGAGCUAGAAA | 1069 | mA*mC*mC*GCACGCUUCAGUGCCUU | 2069 |
| | | UAGCAAGUUAAAAUAAGGCUAGUCCGUUAUCAACUU | | GUUUUAGAmGmCmUmAmGmAmAmAmUmAmGmCAAGUUAAAAUAAGGCUA | |
| | | GAAAAAGUGGCACCGAGUCGGUGCUUUU | | GUCCGUUAUCAmAmCmUmUmGmAmAmAmAmAmGmUmGmGmCmAmCmCmG | |
| | | | | mAmGmUmCmGmGmUmGmCmU*mU*mU*mU | |
| G012159 | CR0011848 | GUGUAAGUAUAGCCUCCUGAGUUUUAGAGCUAGAAA | 1071 | mG*mU*mG*UAAGUAUAGCCUCCUGA | 2071 |
| | | UAGCAAGUUAAAAUAAGGCUAGUCCGUUAUCAACUU | | GUUUUAGAmGmCmUmAmGmAmAmAmUmAmGmCAAGUUAAAAUAAGGCUA | |
| | | GAAAAAGUGGCACCGAGUCGGUGCUUUU | | GUCCGUUAUCAmAmCmUmUmGmAmAmAmAmAmGmUmGmGmCmAmCmCmG | |
| | | | | mAmGmUmCmGmGmUmGmCmU*mU*mU*mU | |
| G012162 | CR0011851 | GGAAAGGCCAGCCCCACUUGGUUUUAGAGCUAGAAA | 1074 | mG*mG*mA*AAGGCCAGCCCCACUUG | 2074 |
| | | UAGCAAGUUAAAAUAAGGCUAGUCCGUUAUCAACUU | | GUUUUAGAmGmCmUmAmGmAmAmAmUmAmGmCAAGUUAAAAUAAGGCUA | |
| | | GAAAAAGUGGCACCGAGUCGGUGCUUUU | | GUCCGUUAUCAmAmCmUmUmGmAmAmAmAmAmGmUmGmGmCmAmCmCmG | |
| | | | | mAmGmUmCmGmGmUmGmCmU*mU*mU*mU | |
| G012164 | CR0011853 | UGCCACAAAGCUCGAGCCCAGUUUUAGAGCUAGAAA | 1076 | mU*mG*mC*CACAAAGCUCGAGCCCA | 2076 |
| | | UAGCAAGUUAAAAUAAGGCUAGUCCGUUAUCAACUU | | GUUUUAGAmGmCmUmAmGmAmAmAmUmAmGmCAAGUUAAAAUAAGGCUA | |
| | | GAAAAAGUGGCACCGAGUCGGUGCUUUU | | GUCCGUUAUCAmAmCmUmUmGmAmAmAmAmAmGmUmGmGmCmAmCmCmG | |
| | | | | mAmGmUmCmGmGmUmGmCmU*mU*mU*mU | |
| G012165 | CR0011854 | GGUGUAAGUAUAGCCUCCUGGUUUUAGAGCUAGAAA | 1077 | mG*mG*mU*GUAAGUAUAGCCUCCUG | 2077 |
| | | UAGCAAGUUAAAAUAAGGCUAGUCCGUUAUCAACUU | | GUUUUAGAmGmCmUmAmGmAmAmAmUmAmGmCAAGUUAAAAUAAGGCUA | |
| | | GAAAAAGUGGCACCGAGUCGGUGCUUUU | | GUCCGUUAUCAmAmCmUmUmGmAmAmAmAmAmGmUmGmGmCmAmCmCmG | |
| | | | | mAmGmUmCmGmGmUmGmCmU*mU*mU*mU | |
| G012166 | CR0011855 | UCCUGAGGGCUCACCCAUCGUUUUAGAGCUAGAAAU | 1078 | mU*mC*mC*UGAGGGCUCACCCAUCG | 2078 |
| | | AGCAAGUUAAAAUAAGGCUAGUCCGUUAUCAACUUG | | GUUUUAGAmGmCmUmAmGmAmAmAmUmAmGmCAAGUUAAAAUAAGGCUA | |
| | | AAAAAGUGGCACCGAGUCGGUGCUUUU | | GUCCGUUAUCAmAmCmUmUmGmAmAmAmAmAmGmUmGmGmCmAmCmCmG | |
| | | | | mAmGmUmCmGmGmUmGmCmU*mU*mU*mU | |
| G012167 | CR0011856 | AGGAAAGGCCAGCCCCACUUGUUUUAGAGCUAGAAA | 1079 | mA*mG*mG*AAAGGCCAGCCCCACUU | 2079 |
| | | UAGCAAGUUAAAAUAAGGCUAGUCCGUUAUCAACUU | | GUUUUAGAmGmCmUmAmGmAmAmAmUmAmGmCAAGUUAAAAUAAGGCUA | |
| | | GAAAAAGUGGCACCGAGUCGGUGCUUUU | | GUCCGUUAUCAmAmCmUmUmGmAmAmAmAmAmGmUmGmGmCmAmCmCmG | |
| | | | | mAmGmUmCmGmGmUmGmCmU*mU*mU*mU | |
| G012169 | CR0011858 | GAGGAAAGGCCAGCCCCACUGUUUUAGAGCUAGAAA | 1081 | mG*mA*mG*GAAAGGCCAGCCCCACU | 2081 |
| | | UAGCAAGUUAAAAUAAGGCUAGUCCGUUAUCAACUU | | GUUUUAGAmGmCmUmAmGmAmAmAmUmAmGmCAAGUUAAAAUAAGGCUA | |
| | | GAAAAAGUGGCACCGAGUCGGUGCUUUU | | GUCCGUUAUCAmAmCmUmUmGmAmAmAmAmAmGmUmGmGmCmAmCmCmG | |
| | | | | mAmGmUmCmGmGmUmGmCmU*mU*mU*mU | |

TABLE 2A
(Conserved Portion of a spyCas9 sgRNA; SEQ ID NO: 400)

| 1 | 2 | 3 | 4 | 5 | 6 | 7 | 8 | 9 | 10 | 11 | 12 | 13 | 14 | 15 |
|---|---|---|---|---|---|---|---|---|---|---|---|---|---|---|
| G | U | U | U | U | A | G | A | G | C | U | A | G | A | A |
| LS1-LS6 | | | | | | B1-B2 | | US1-US12 | | | | | | |
| 16 | 17 | 18 | 19 | 20 | 21 | 22 | 23 | 24 | 25 | 26 | 27 | 28 | 29 | 30 |
| A | U | A | G | C | A | A | G | U | U | A | A | A | A | U |
| US1-US12 | | | | | B2-B6 | | | | LS7-LS12 | | | | | |
| 31 | 32 | 33 | 34 | 35 | 36 | 37 | 38 | 39 | 40 | 41 | 42 | 43 | 44 | 45 |
| A | A | G | G | C | U | A | G | U | C | C | G | U | U | A |

Nexus

| 46 | 47 | 48 | 49 | 50 | 51 | 52 | 53 | 54 | 55 | 56 | 57 | 58 | 59 | 60 |
|---|---|---|---|---|---|---|---|---|---|---|---|---|---|---|
| U | C | A | A | C | U | U | G | A | A | A | A | A | G | U |

| | |
|---|---|
| Nexus | H1-1 through H1-12 |

| 61 | 62 | 63 | 64 | 65 | 66 | 67 | 68 |
|---|---|---|---|---|---|---|---|
| G | G | C | A | C | C | G | A |
| N | H2-1 through H2-15 | | | | | | |
| 69 | 70 | 71 | 72 | 73 | 74 | 75 | 76 |
| G | U | C | G | G | U | G | C |

H2-1 through H2-15

TABLE 2B

| | LS1-6 | | B1 -2 | | US1-12 | | B3-6 | |
|---|---|---|---|---|---|---|---|---|
| 5′ terminus (n) | lower stem | n | bulge | n | upper stem | n | bulge | n |

| LS7-12 | | N1-18 | | H1-1 thru H1-12 | | H2-1 thru H2-15 | |
|---|---|---|---|---|---|---|---|
| lower stem | n | nexus | n | hairpin 1 | n | hairpin 2 | 3′ terminus |

[0263] In some embodiments, the invention provides a composition comprising one or more guide RNA (gRNA) comprising guide sequences that direct an RNA-guided DNA binding agent, which can be a nuclease (e.g., a Cas nuclease such as Cas9), to a target DNA sequence in LDHA. The gRNA may comprise a crRNA comprising a guide sequence shown in Table 1. The gRNA may comprise a crRNA comprising 17, 18, 19, or 20 contiguous nucleotides of a guide sequence shown in Table 1. In some embodiments, the gRNA comprises a crRNA comprising a sequence with about 75%, 80%, 85%, 90%, 95%, 96%, 97%, 98%, 99%, or 100% identity to at least 17, 18, 19, or 20 contiguous nucleotides of a guide sequence shown in Table 1. In some embodiments, the gRNA comprises a crRNA comprising a sequence with about 75%, 80%, 85%, 90%, 95%, 96%, 97%, 98%, 99%, or 100% identity to a guide sequence shown in Table 1. The gRNA may further comprise a trRNA. In each composition and method embodiment described herein, the crRNA and trRNA may be associated as a single RNA (sgRNA) or may be on separate RNAs (dgRNA). In the context of sgRNAs, the crRNA and trRNA components may be covalently linked, e.g., via a phosphodiester bond or other covalent bond.

[0264] In each of the composition, use, and method embodiments described herein, the guide RNA may comprise two RNA molecules as a “dual guide RNA” or “dgRNA”. The dgRNA comprises a first RNA molecule comprising a crRNA comprising, e.g., a guide sequence shown in Table 1, and a second RNA molecule comprising a trRNA. The first and second RNA molecules may not be covalently linked but may form an RNA duplex via the base pairing between portions of the crRNA and the trRNA.

[0265] In each of the composition, use, and method embodiments described herein, the guide RNA may comprise a single RNA molecule as a “single guide RNA” or “sgRNA”. The sgRNA may comprise a crRNA (or a portion thereof) comprising a guide sequence shown in Table 1 covalently linked to a trRNA. The sgRNA may comprise 17, 18, 19, or 20 contiguous nucleotides of a guide sequence shown in Table 1. In some embodiments, the crRNA and the trRNA are covalently linked via a linker. In some embodiments, the sgRNA forms a stem-loop structure via the base pairing between portions of the crRNA and the trRNA. In some embodiments, the crRNA and the trRNA are covalently linked via one or more bonds that are not a phosphodiester bond.

[0266] In some embodiments, the trRNA may comprise all or a portion of a trRNA sequence derived from a naturally-occurring CRISPR/Cas system. In some embodiments, the trRNA comprises a truncated or modified wild type trRNA. The length of the trRNA depends on the CRISPR/Cas system used. In some embodiments, the trRNA comprises or consists of 5, 6, 7, 8, 9, 10, 11, 12, 13, 14, 15, 16, 17, 18, 19, 20, 25, 30, 40, 50, 60, 70, 80, 90, 100, or more than 100 nucleotides. In some embodiments, the trRNA may comprise certain secondary structures, such as, for example, one or more hairpin or stem-loop structures, or one or more bulge structures.

[0267] In some embodiments, the invention provides a composition comprising one or more guide RNAs comprising a guide sequence of any one of SEQ ID NOs:1-84.

[0268] In some embodiments, the invention provides a composition comprising one or more sgRNAs comprising any one of SEQ ID NOs: 1001, 1005, 1007, 1008, 1014, 1023, 1027, 1032, 1045, 1048, 1063, 1067, 1069, 1071, 1074, 1076, 1077, 1078, 1079, and 1081, or modified versions thereof as shown, e.g., in SEQ ID NOs: 2001, 2005, 2007, 2008, 2014, 2023, 2027, 2032, 2045, 2048, 2063, 2067, 2069, 2071, 2074, 2076, 2077, 2078, 2079, and 2081.

[0269] In one aspect, the invention provides a composition comprising a gRNA that comprises a guide sequence that is at least 99%, 98%, 97%, 96%, 95%, 94%, 93%, 92%, 91%, or 90% identical to any of the nucleic acids of SEQ ID NOs:1-84.

[0270] In other embodiments, the composition comprises at least one, e.g., at least two gRNA's comprising guide sequences selected from any two or more of the guide sequences of SEQ ID NOs:1-84. In some embodiments, the composition comprises at least two gRNA's that each comprise a guide sequence at least 99%, 98%, 97%, 96%, 95%, 94%, 93%, 92%, 91%, or 90% identical to any of the nucleic acids of SEQ ID NOs:1-84.

[0271] The guide RNA compositions of the present invention are designed to recognize (e.g., hybridize to) a target sequence in the LDHA gene. For example, the LDHA target sequence may be recognized and cleaved by a provided Cas cleavase comprising a guide RNA. In some embodiments, an RNA-guided DNA binding agent, such as a Cas cleavase, may be directed by a guide RNA to a target sequence of the LDHA gene, where the guide sequence of the guide RNA hybridizes with the target sequence and the RNA-guided DNA binding agent, such as a Cas cleavase, cleaves the target sequence.

[0272] In some embodiments, the selection of the one or more guide RNAs is determined based on target sequences within the LDHA gene.

[0273] Without being bound by any particular theory, mutations (e.g., frameshift mutations resulting from indels occurring as a result of a nuclease-mediated DSB) in certain regions of the gene may be less tolerable than mutations in other regions of the gene, thus the location of a DSB is an important factor in the amount or type of protein knockdown that may result. In some embodiments, a gRNA complementary or having complementarity to a target sequence within LDHA is used to direct the RNA-guided DNA binding agent to a particular location in the LDHA gene. In some embodiments, gRNAs are designed to have guide sequences that are complementary or have complementarity to target sequences in exon 1, exon 2, exon 3, exon 4, exon 5, exon 6, exon 7 or exon 8 of LDHA.

[0274] In some embodiments, the guide sequence is at least 99%, 98%, 97%, 96%, 95%, 94%, 93%, 92%, 91%, or 90% identical to a target sequence present in the human LDHA gene. In some embodiments, the target sequence may be complementary to the guide sequence of the guide RNA. In some embodiments, the degree of complementarity or identity between a guide sequence of a guide RNA and its corresponding target sequence may be at least 80%, 85%, 90%, 95%, 96%, 97%, 98%, 99%, or 100%. In some embodiments, the target sequence and the guide sequence of the gRNA may be 100% complementary or identical. In other embodiments, the target sequence and the guide sequence of the gRNA may contain at least one mismatch. For example, the target sequence and the guide sequence of the gRNA may contain 1, 2, 3, or 4 mismatches, where the total length of the guide sequence is 20. In some embodiments, the target sequence and the guide sequence of the gRNA may contain 1-4 mismatches where the guide sequence is 20 nucleotides.

[0275] In some embodiments, a composition or formulation disclosed herein comprises an mRNA comprising an open reading frame (ORF) encoding an RNA-guided DNA binding agent, such as a Cas nuclease as described herein. In some embodiments, an mRNA comprising an ORF encoding an RNA-guided DNA binding agent, such as a Cas nuclease, is provided, used, or administered.

B. Modified gRNAs and mRNAs

[0276] In some embodiments, the gRNA is chemically modified. A gRNA comprising one or more modified nucleosides or nucleotides is called a “modified” gRNA or “chemically modified” gRNA, to describe the presence of one or more non-naturally and/or naturally occurring components or configurations that are used instead of or in addition to the canonical A, G, C, and U residues. In some embodiments, a modified gRNA is synthesized with a non-canonical nucleoside or nucleotide, is here called “modified.” Modified nucleosides and nucleotides can include one or more of: (i) alteration, e.g., replacement, of one or both of the non-linking phosphate oxygens and/or of one or more of the linking phosphate oxygens in the phosphodiester backbone linkage (an exemplary backbone modification); (ii) alteration, e.g., replacement, of a constituent of the ribose sugar, e.g., of the 2′ hydroxyl on the ribose sugar (an exemplary sugar modification); (iii) wholesale replacement of the phosphate moiety with “dephospho” linkers (an exemplary backbone modification); (iv) modification or replacement of a naturally occurring nucleobase, including with a non-canonical nucleobase (an exemplary base modification); (v) replacement or modification of the ribose-phosphate backbone (an exemplary backbone modification); (vi) modification of the 3′ end or 5′ end of the oligonucleotide, e.g., removal, modification or replacement of a terminal phosphate group or conjugation of a moiety, cap or linker (such 3′ or 5′ cap modifications may comprise a sugar and/or backbone modification); and (vii) modification or replacement of the sugar (an exemplary sugar modification).

[0277] Chemical modifications such as those listed above can be combined to provide modified gRNAs and/or mRNAs comprising nucleosides and nucleotides (collectively “residues”) that can have two, three, four, or more modifications. For example, a modified residue can have a modified sugar and a modified nucleobase. In some embodiments, every base of a gRNA is modified, e.g., all bases have a modified phosphate group, such as a phosphorothioate group. In certain embodiments, all, or substantially all, of the phosphate groups of an gRNA molecule are replaced with phosphorothioate groups. In some embodiments, modified gRNAs comprise at least one modified residue at or near the 5′ end of the RNA. In some embodiments, modified gRNAs comprise at least one modified residue at or near the 3′ end of the RNA.

[0278] In some embodiments, the gRNA comprises one, two, three or more modified residues. In some embodiments, at least 5% (e.g., at least 5%, at least 10%, at least 15%, at least 20%, at least 25%, at least 30%, at least 35%, at least 40%, at least 45%, at least 50%, at least 55%, at least 60%, at least 65%, at least 70%, at least 75%, at least 80%, at least 85%, at least 90%, at least 95%, or 100%) of the positions in a modified gRNA are modified nucleosides or nucleotides.

[0279] Unmodified nucleic acids can be prone to degradation by, e.g., intracellular nucleases or those found in serum. For example, nucleases can hydrolyze nucleic acid phosphodiester bonds. Accordingly, in one aspect the gRNAs described herein can contain one or more modified nucleosides or nucleotides, e.g., to introduce stability toward intracellular or serum-based nucleases. In some embodiments, the modified gRNA molecules described herein can exhibit a reduced innate immune response when introduced into a population of cells, both in vivo and ex vivo. The term “innate immune response” includes a cellular response to exogenous nucleic acids, including single stranded nucleic acids, which involves the induction of cytokine expression and release, particularly the interferons, and cell death.

[0280] In some embodiments of a backbone modification, the phosphate group of a modified residue can be modified by replacing one or more of the oxygens with a different substituent. Further, the modified residue, e.g., modified residue present in a modified nucleic acid, can include the wholesale replacement of an unmodified phosphate moiety with a modified phosphate group as described herein. In some embodiments, the backbone modification of the phosphate backbone can include alterations that result in either an uncharged linker or a charged linker with unsymmetrical charge distribution.

[0281] Examples of modified phosphate groups include, phosphorothioate, phosphoroselenates, borano phosphates, borano phosphate esters, hydrogen phosphonates, phosphoroamidates, alkyl or aryl phosphonates and phosphotriesters. The phosphorous atom in an unmodified phosphate group is achiral. However, replacement of one of the non-bridging oxygens with one of the above atoms or groups of atoms can render the phosphorous atom chiral. The stereogenic phosphorous atom can possess either the “R” configuration (herein Rp) or the “S” configuration (herein Sp). The backbone can also be modified by replacement of a bridging oxygen, (i.e., the oxygen that links the phosphate to the nucleoside), with nitrogen (bridged phosphoroamidates), sulfur (bridged phosphorothioates) and carbon (bridged methylenephosphonates). The replacement can occur at either linking oxygen or at both of the linking oxygens.

[0282] The phosphate group can be replaced by non-phosphorus containing connectors in certain backbone modifications. In some embodiments, the charged phosphate group can be replaced by a neutral moiety. Examples of moieties which can replace the phosphate group can include, without limitation, e.g., methyl phosphonate, hydroxylamino, siloxane, carbonate, carboxymethyl, carbamate, amide, thioether, ethylene oxide linker, sulfonate, sulfonamide, thioformacetal, formacetal, oxime, methyleneimino, methylenemethylimino, methylenehydrazo, methylenedimethylhydrazo and methyleneoxymethylimino.

[0283] Scaffolds that can mimic nucleic acids can also be constructed wherein the phosphate linker and ribose sugar are replaced by nuclease resistant nucleoside or nucleotide surrogates. Such modifications may comprise backbone and sugar modifications. In some embodiments, the nucleobases can be tethered by a surrogate backbone. Examples can include, without limitation, the morpholino, cyclobutyl, pyrrolidine and peptide nucleic acid (PNA) nucleoside surrogates.

[0284] The modified nucleosides and modified nucleotides can include one or more modifications to the sugar group, i.e. at sugar modification. For example, the 2′ hydroxyl group (OH) can be modified, e.g. replaced with a number of different “oxy” or “deoxy” substituents. In some embodiments, modifications to the 2′ hydroxyl group can enhance the stability of the nucleic acid since the hydroxyl can no longer be deprotonated to form a 2′-alkoxide ion.

[0285] Examples of 2′ hydroxyl group modifications can include alkoxy or aryloxy (OR, wherein “R” can be, e.g., alkyl, cycloalkyl, aryl, aralkyl, heteroaryl or a sugar); polyethyleneglycols (PEG), O(CH₂CH₂O)ₙCH₂CH₂OR wherein R can be, e.g., H or optionally substituted alkyl, and n can be an integer from 0 to 20 (e.g., from 0 to 4, from 0 to 8, from 0 to 10, from 0 to 16, from 1 to 4, from 1 to 8, from 1 to 10, from 1 to 16, from 1 to 20, from 2 to 4, from 2 to 8, from 2 to 10, from 2 to 16, from 2 to 20, from 4 to 8, from 4 to 10, from 4 to 16, and from 4 to 20). In some embodiments, the 2′ hydroxyl group modification can be 2′-O-Me. In some embodiments, the 2′ hydroxyl group modification can be a 2′-fluoro modification, which replaces the 2′ hydroxyl group with a fluoride. In some embodiments, the 2′ hydroxyl group modification can include “locked” nucleic acids (LNA) in which the 2′ hydroxyl can be connected, e.g., by a C₁₋₆ alkylene or C₁₋₆ heteroalkylene bridge, to the 4′ carbon of the same ribose sugar, where exemplary bridges can include methylene, propylene, ether, or amino bridges; O-amino (wherein amino can be, e.g., NH₂; alkylamino, dialkylamino, heterocyclyl, arylamino, diarylamino, heteroarylamino, or diheteroarylamino, ethylenediamine, or polyamino) and aminoalkoxy, O(CH₂)n-amino, (wherein amino can be, e.g., NH₂; alkylamino, dialkylamino, heterocyclyl, arylamino, diarylamino, heteroarylamino, or diheteroarylamino, ethylenediamine, or polyamino). In some embodiments, the 2′ hydroxyl group modification can include “unlocked” nucleic acids (UNA) in which the ribose ring lacks the C2′-C3′ bond. In some embodiments, the 2′ hydroxyl group modification can include the methoxyethyl group (MOE), (OCH₂CH₂OCH₃, e.g., a PEG derivative).

[0286] “Deoxy” 2′ modifications can include hydrogen (i.e. deoxyribose sugars, e.g., at the overhang portions of partially dsRNA); halo (e.g., bromo, chloro, fluoro, or iodo); amino (wherein amino can be, e.g., NH₂; alkylamino, dialkylamino, heterocyclyl, arylamino, diarylamino, heteroarylamino, diheteroarylamino, or amino acid); NH(CH₂CH₂NH)˜CH2CH₂— amino (wherein amino can be, e.g., as described herein), —NHC(O)R (wherein R can be, e.g., alkyl, cycloalkyl, aryl, aralkyl, heteroaryl or sugar), cyano; mercapto; alkyl-thio-alkyl; thioalkoxy; and alkyl, cycloalkyl, aryl, alkenyl and alkynyl, which may be optionally substituted with e.g., an amino as described herein.

[0287] The sugar modification can comprise a sugar group which may also contain one or more carbons that possess the opposite stereochemical configuration than that of the corresponding carbon in ribose. Thus, a modified nucleic acid can include nucleotides containing e.g., arabinose, as the sugar. The modified nucleic acids can also include abasic sugars. These abasic sugars can also be further modified at one or more of the constituent sugar atoms. The modified nucleic acids can also include one or more sugars that are in the L form, e.g. L-nucleosides.

[0288] The modified nucleosides and modified nucleotides described herein, which can be incorporated into a modified nucleic acid, can include a modified base, also called a nucleobase. Examples of nucleobases include, but are not limited to, adenine (A), guanine (G), cytosine (C), and uracil (U). These nucleobases can be modified or wholly replaced to provide modified residues that can be incorporated into modified nucleic acids. The nucleobase of the nucleotide can be independently selected from a purine, a pyrimidine, a purine analog, or pyrimidine analog. In some embodiments, the nucleobase can include, for example, naturally-occurring and synthetic derivatives of a base.

[0289] In embodiments employing a dual guide RNA, each of the crRNA and the tracr RNA can contain modifications. Such modifications may be at one or both ends of the crRNA and/or tracr RNA. In embodiments comprising an sgRNA, one or more residues at one or both ends of the sgRNA may be chemically modified, and/or internal nucleosides may be modified, and/or the entire sgRNA may be chemically modified. Certain embodiments comprise a 5′ end modification. Certain embodiments comprise a 3′ end modification.

[0290] In some embodiments, the guide RNAs disclosed herein comprise one of the modification patterns disclosed in WO2018/107028 A1, filed Dec. 8, 2017, titled “Chemically Modified Guide RNAs,” the contents of which are hereby incorporated by reference in their entirety. In some embodiments, the guide RNAs disclosed herein comprise one of the structures/modification patterns disclosed in US20170114334, the contents of which are hereby incorporated by reference in their entirety. In some embodiments, the guide RNAs disclosed herein comprise one of the structures/modification patterns disclosed in WO2017/136794, the contents of which are hereby incorporated by reference in their entirety.

### C. YA Modifications

[0291] A modification at a YA site (also referred to herein as “YA modification”) can be a modification of the internucleoside linkage, a modification of the base (pyrimidine or adenine), e.g. by chemical modification, substitution, or otherwise, and/or a modification of the sugar (e.g. at the 2′ position, such as 2′-O-alkyl, 2′-F, 2′-moe, 2′-F arabinose, 2′-H (deoxyribose), and the like). In some embodiments, a “YA modification” is any modification that alters the structure of the dinucleotide motif to reduce RNA endonuclease activity, e.g., by interfering with recognition or cleavage of a YA site by an RNase and/or by stabilizing an RNA structure (e.g., secondary structure) that decreases accessibility of a cleavage site to an RNase. See Peacock et al., J Org Chem. 76: 7295-7300 (2011); Behlke, Oligonucleotides 18:305-320 (2008); Ku et al., Adv. Drug Delivery Reviews 104: 16-28 (2016); Ghidini et al., Chem. Commun., 2013, 49, 9036. Peacock et al., Belhke, Ku, and Ghidini provide exemplary modifications suitable as YA modifications. Modifications known to those of skill in the art to reduce endonucleolytic degradation are encompassed. Exemplary 2′ ribose modifications that affect the 2′ hydroxyl group involved in RNase cleavage are 2′-H and 2′-O-alkyl, including 2′-O-Me. Modifications such as bicyclic ribose analogs, UNA, and modified internucleoside linkages of the residues at the YA site can be YA modifications. Exemplary base modifications that can stabilize RNA structures are pseudouridine and 5-methylcytosine. In some embodiments, at least one nucleotide of the YA site is modified. In some embodiments, the pyrimidine (also called “pyrimidine position”) of the YA site comprises a modification (which includes a modification altering the internucleoside linkage immediately 3′ of the sugar of the pyrimidine, a modification of the pyrimidine base, and a modification of the ribose, e.g. at its 2′ position). In some embodiments, the adenine (also called “adenine position”) of the YA site comprises a modification (which includes a modification altering the internucleoside linkage immediately 3′ of the sugar of the pyrimidine, a modification of the pyrimidine base, and a modification of the ribose, e.g. at its 2′ position). In some embodiments, the pyrimidine and the adenine of the YA site comprise modifications. In some embodiments, the YA modification reduces RNA endonuclease activity.

[0292] In some embodiments, an sgRNA comprises modifications at 1, 2, 3, 4, 5, 6, 7, 8, 9, 10, 11, 12, 13, 14, 15, 16, or more YA sites. In some embodiments, the pyrimidine of the YA site comprises a modification (which includes a modification altering the internucleoside linkage immediately 3′ of the sugar of the pyrimidine). In some embodiments, the adenine of the YA site comprises a modification (which includes a modification altering the internucleoside linkage immediately 3′ of the sugar of the adenine). In some embodiments, the pyrimidine and the adenine of the YA site comprise modifications, such as sugar, base, or internucleoside linkage modifications. The YA modifications can be any of the types of modifications set forth herein. In some embodiments, the YA modifications comprise one or more of phosphorothioate, 2′-OMe, or 2′-fluoro. In some embodiments, the YA modifications comprise pyrimidine modifications comprising one or more of phosphorothioate, 2′-OMe, or 2′-fluoro. In some embodiments, the YA modification comprises a bicyclic ribose analog (e.g., an LNA, BNA, or ENA) within an RNA duplex region that contains one or more YA sites. In some embodiments, the YA modification comprises a bicyclic ribose analog (e.g., an LNA, BNA, or ENA) within an RNA duplex region that contains a YA site, wherein the YA modification is distal to the YA site.

[0293] In some embodiments, the sgRNA comprises a guide region YA site modification. In some embodiments, the guide region comprises 1, 2, 3, 4, 5, or more YA sites (“guide region YA sites”) that may comprise YA modifications. In some embodiments, one or more YA sites located at 5-end, 6-end, 7-end, 8-end, 9-end, or 10-end from the 5′ end of the 5′ terminus (where “5-end”, etc., refers to position 5 to the 3′ end of the guide region, i.e., the most 3′ nucleotide in the guide region) comprise YA modifications. In some embodiments, two or more YA sites located at 5-end, 6-end, 7-end, 8-end, 9-end, or 10-end from the 5′ end of the 5′ terminus comprise YA modifications. In some embodiments, three or more YA sites located at 5-end, 6-end, 7-end, 8-end, 9-end, or 10-end from the 5′ end of the 5′ terminus comprise YA modifications. In some embodiments, four or more YA sites located at 5-end, 6-end, 7-end, 8-end, 9-end, or 10-end from the 5′ end of the 5′ terminus comprise YA modifications. In some embodiments, five or more YA sites located at 5-end, 6-end, 7-end, 8-end, 9-end, or 10-end from the 5′ end of the 5′ terminus comprise YA modifications. A modified guide region YA site comprises a YA modification.

[0294] In some embodiments, a modified guide region YA site is within 17, 16, 15, 14, 13, 12, 11, 10, or 9 nucleotides of the 3′ terminal nucleotide of the guide region. For example, if a modified guide region YA site is within 10 nucleotides of the 3′ terminal nucleotide of the guide region and the guide region is 20 nucleotides long, then the modified nucleotide of the modified guide region YA site is located at any of positions 11-20. In some embodiments, a YA modification is located within a YA site 20, 19, 18, 17, 16, 15, 14, 13, 12, 11, 10, 9, 8, 7, 6, 5, 4, 3, 2, or 1 nucleotides from the 3′ terminal nucleotide of the guide region. In some embodiments, a YA modification is located 20, 19, 18, 17, 16, 15, 14, 13, 12, 11, 10, 9, 8, 7, 6, 5, 4, 3, 2, or 1 nucleotides from the 3′ terminal nucleotide of the guide region.

[0295] In some embodiments, a modified guide region YA site is at or after nucleotide 4, 5, 6, 7, 8, 9, 10, or 11 from the 5′ end of the 5′ terminus.

[0296] In some embodiments, a modified guide region YA site is other than a 5′ end modification. For example, an sgRNA can comprise a 5′ end modification as described herein and further comprise a modified guide region YA site. Alternatively, an sgRNA can comprise an unmodified 5′ end and a modified guide region YA site. Alternatively, an sgRNA can comprise a modified 5′ end and an unmodified guide region YA site.

[0297] In some embodiments, a modified guide region YA site comprises a modification that at least one nucleotide located 5′ of the guide region YA site does not comprise. For example, if nucleotides 1-3 comprise phosphorothioates, nucleotide 4 comprises only a 2′-OMe modification, and nucleotide 5 is the pyrimidine of a YA site and comprises a phosphorothioate, then the modified guide region YA site comprises a modification (phosphorothioate) that at least one nucleotide located 5′ of the guide region YA site (nucleotide 4) does not comprise. In another example, if nucleotides 1-3 comprise phosphorothioates, and nucleotide 4 is the pyrimidine of a YA site and comprises a 2′-OMe, then the modified guide region YA site comprises a modification (2′-OMe) that at least one nucleotide located 5′ of the guide region YA site (any of nucleotides 1-3) does not comprise. This condition is also always satisfied if an unmodified nucleotide is located 5′ of the modified guide region YA site.

[0298] In some embodiments, the modified guide region YA sites comprise modifications as described for YA sites above.

[0299] Additional embodiments of guide region YA site modifications are set forth in the summary above. Any embodiments set forth elsewhere in this disclosure may be combined to the extent feasible with any of the foregoing embodiments.

[0300] In some embodiments, the sgRNA comprises a conserved region YA site modification. Conserved region YA sites 1-10 are illustrated in FIG. 10. In some embodiments, 1, 2, 3, 4, 5, 6, 7, 8, 9, or 10 conserved region YA sites comprise modifications.

[0301] In some embodiments, conserved region YA sites 1, 8, or 1 and 8 comprise YA modifications. In some embodiments, conserved region YA sites 1, 2, 3, 4, and 10 comprise YA modifications. In some embodiments, YA sites 2, 3, 4, 8, and 10 comprise YA modifications. In some embodiments, conserved region YA sites 1, 2, 3, and 10 comprise YA modifications. In some embodiments, YA sites 2, 3, 8, and 10 comprise YA modifications. In some embodiments, YA sites 1, 2, 3, 4, 8, and 10 comprise YA modifications. In some embodiments, 1, 2, 3, 4, 5, 6, 7, or 8 additional conserved region YA sites comprise YA modifications.

[0302] In some embodiments, 1, 2, 3, or 4 of conserved region YA sites 2, 3, 4, and 10 comprise YA modifications. In some embodiments, 1, 2, 3, 4, 5, 6, 7, or 8 additional conserved region YA sites comprise YA modifications.

[0303] In some embodiments, the modified conserved region YA sites comprise modifications as described for YA sites above.

[0304] Additional embodiments of conserved region YA site modifications are set forth in the summary above. Any embodiments set forth elsewhere in this disclosure may be combined to the extent feasible with any of the foregoing embodiments.

[0305] In some embodiments, the sgRNA comprises any of the modification patterns shown above in Table 2, or below in Table 3, where N, if present, is any natural or non-natural nucleotide, and wherein the totality of the N's comprise an LDHA guide sequence as described herein in Table 1. Table 3 does not depict the guide sequence portion of the sgRNA. The modifications remain as shown in Table 3 despite the substitution of N's for the nucleotides of a guide. That is, although the nucleotides of the guide replace the “N's”, the nucleotides are modified as shown in Table 3. When the guide sequence is appended to the 5′ end, the 5′ end (or 5′ terminus) of the guide sequence may be modified. In some embodiments, the modifications comprise 2′-O-Me and/or PS-bonds. In some embodiments, the 2′-O-Me and/or PS-bonds are at the first 1 to 7, 1 to 6, 1 to 5, 1 to 4, or 1 to 3 nucleotides of the guide sequence at its 5′ end.

TABLE 3
LDHA sgRNA modification patterns. The guide sequence is not shown
and will append the shown sequence at its 5′ end.

| SEQ ID | | |
|---|---|---|
| NO | Name | Sequence |
| 400 | G000262-mod | GUUUUAGAGCUAGAAAUAGCAAGUUAAAAUAAGGCUAGUCCGUUAUCAA |
| | only | CUUGAAAAAGUmGmGmCmAmCmCmGmAmGmUmCmGmGmUmGmCmU*mU |
| | | *mU*mU |
| 401 | G000263-mod | GUUUUAGAGCUAGAAAUAGCAAGUUAAAAUAAGGCUAGUCCGUUAUCAm |
| | only | AmCmUmUmGmAmAmAmAmAmGmUmGmGmCmAmCmCmGmAmGmUmCmG |
| | | mGmUmGmCmU*mU*mU*mU |
| 402 | G000264-mod | GUUUUAGAGCUAmGmAmAmAUAGCAAGUUAAAAUAAGGCUAGUCCGUU |
| | only | AUCAACUUGAAAAAGUGGCACCGAGUCGGUGCmU*mU*mU*U |
| 403 | G000265-mod | GUUUUAGAmGmCmUmAGAAAmUmAmGmCAAGUUAAAAUAAGGCUAGUC |
| | only | CGUUAUCAACUUGAAAAAGUGGCACCGAGUCGGUGCmU*mU*mU*U |
| 404 | G000266-mod | GUUUUAGAmGmCmUmAmGmAmAmAmUmAmGmCAAGUUAAAAUAAGGCU |
| | only | AGUCCGUUAUCAACUUGAAAAAGUGGCACCGAGUCGGUGCmU*mU*mU*U |
| 405 | G000267-mod | GUUUUAGAmGmCmUmAmGmAmAmAmUmAmGmCAAGUUAAAAUAAGGCU |
| | only | AGUCCGUUAUCAmAmCmUmUmGmAmAmAmAmAmGmUmGmGmCmAmCmC |
| | | mGmAmGmUmCmGmGmUmGmCmU*mU*mU*mU |
| 406 | G000331- | mGUUUUmAGAmGmCmUmAmGmAmAmAmUmAmGmCAAGUUAAAAUAAG |
| | mod only | GCUAGUCCGUUAUCAmAmCmUmUmGmAmAmAmAmAmGmUmGmGmCmA |
| | | mCmCmGmAmGmUmCmGmGmUmGmCmU*mU*mU*mU |
| 407 | G000332- | fGfUfUfUfUfAGAmGmCmUmAmGmAmAmAmUmAmGmCAAGUUAAAAUAA |
| | mod only | GGCUAGUCCGUUAUCAmAmCmUmUmGmAmAmAmAmAmGmUmGmGmCm |
| | | AmCmCmGmAmGmUmCmGmGmUmGmCmU*mU*mU*mU |
| 408 | G000333- | mGfUfUfUfUmAGAmGmCmUmAmGmAmAmAmUmAmGmCAAGUUAAAAUA |
| | mod only | AGGCUAGUCCGUUAUCAmAmCmUmUmGmAmAmAmAmAmGmUmGmGmC |
| | | mAmCmCmGmAmGmUmCmGmGmUmGmCmU*mU*mU*mU |
| 409 | G000334- | GUUUUAGAmGmCmUmAmGmAmAmAmUmAmGmCAAGUmUmAAAmAmUA |
| | mod only | AGGCUAGUCCGUUAUCAmAmCmUmUmGmAmAmAmAmAmGmUmGmGmC |
| | | mAmCmCmGmAmGmUmCmGmGmUmGmCmU*mU*mU*mU |
| 410 | G000335- | GUUUUAGAmGmCmUmAmGmAmAmAmUmAmGmCAAGUmUmAfAfAmAmU |
| | mod only | AAGGCUAGUCCGUUAUCAmAmCmUmUmGmAmAmAmAmAmGmUmGmGm |
| | | CmAmCmCmGmAmGmUmCmGmGmUmGmCmU*mU*mU*mU |
| 411 | G000336- | GUUUUAGAmGmCmUmAmGmAmAmAmUmAmGmCAAGUfUmAfAmAfAmU |
| | mod only | AAGGCUAGUCCGUUAUCAmAmCmUmUmGmAmAmAmAmAmGmUmGmGm |
| | | CmAmCmCmGmAmGmUmCmGmGmUmGmCmU*mU*mU*mU |
| 412 | G000337- | mGUUUUmAGAmGmCmUmAmGmAmAmAmUmAmGmCAAGUmUmAAAmA |
| | mod only | mUAAGGCUAGUCCGUUAUCAmAmCmUmUmGmAmAmAmAmAmGmUmGm |
| | | GmCmAmCmCmGmAmGmUmCmGmGmUmGmCmU*mU*mU*mU |
| 413 | G000338- | mGUUUUmAGAmGmCmUmAmGmAmAmAmUmAmGmCAAGUmUmAfAfAmA |
| | mod only | mUAAGGCUAGUCCGUUAUCAmAmCmUmUmGmAmAmAmAmAmGmUmGm |
| | | GmCmAmCmCmGmAmGmUmCmGmGmUmGmCmU*mU*mU*mU |
| 414 | G000339- | mGUUUUmAGAmGmCmUmAmGmAmAmAmUmAmGmCAAGUfUmAfAmAfA |
| | mod only | mUAAGGCUAGUCCGUUAUCAmAmCmUmUmGmAmAmAmAmAmGmUmGm |
| | | GmCmAmCmCmGmAmGmUmCmGmGmUmGmCmU*mU*mU*mU |
| 415 | G000340- | fGfUfUfUfUfAGAmGmCmUmAmGmAmAmAmUmAmGmCAAGUmUmAAAmA |
| | mod only | mUAAGGCUAGUCCGUUAUCAmAmCmUmUmGmAmAmAmAmAmGmUmGm |
| | | GmCmAmCmCmGmAmGmUmCmGmGmUmGmCmU*mU*mU*mU |
| 416 | G000341- | fGfUfUfUfUfAGAmGmCmUmAmGmAmAmAmUmAmGmCAAGUmUmAfAfAm |
| | mod only | AmUAAGGCUAGUCCGUUAUCAmAmCmUmUmGmAmAmAmAmAmGmUmG |
| | | mGmCmAmCmCmGmAmGmUmCmGmGmUmGmCmU*mU*mU*mU |
| 417 | G000342- | fGfUfUfUfUfAGAmGmCmUmAmGmAmAmAmUmAmGmCAAGUfUmAfAmAfA |
| | mod only | mUAAGGCUAGUCCGUUAUCAmAmCmUmUmGmAmAmAmAmAmGmUmGm |
| | | GmCmAmCmCmGmAmGmUmCmGmGmUmGmCmU*mU*mU*mU |
| 418 | G000343- | GUUUUAmGmAmGmCmUmAmGmAmAmAmUmAmGmCAAGUUAAAAUAAG |
| | mod only | GCUAGUCCGUUAUCAmAmCmUmUmGmAmAmAmAmAmGmUmGmGmCmA |
| | | mCmCmGmAmGmUmCmGmGmUmGmCmU*mU*mU*mU |
| 419 | G000344- | GUUUUAGAmGmCmUmAmGmAmAmAmUmAmGmCmAmAmGmUUAAAAUA |
| | mod only | AGGCUAGUCCGUUAUCAmAmCmUmUmGmAmAmAmAmAmGmUmGmGmC |
| | | mAmCmCmGmAmGmUmCmGmGmUmGmCmU*mU*mU*mU |
| 420 | G000345- | GUUUUAGAmGmCmUmAmGmAmAmAmUmAmGmCAAGUUAAAAUAAGGC |
| | mod only | UAGUCCGUUfAfUfCfAmAmCmUmUmGmAmAmAmAmAmGmUmGmGmCmA |
| | | mCmCmGmAmGmUmCmGmGmUmGmCmU*mU*mU*mU |
| 421 | G000346- | GUUUUAGAmGmCmUmAmGmAmAmAmUmAmGmCAAGUUAAAAUAAGGC |
| | mod only | UAGUCCGUUAmUmCmAmAmCmUmUmGmAmAmAmAmAmGmUmGmGmCm |
| | | AmCmCmGmAmGmUmCmGmGmUmGmCmU*mU*mU*mU |
| 422 | G000347- | fGfUfUfUfUfAmGmAmGmCmUmAmGmAmAmAmUmAmGmCmAmAmGmUmU |
| | mod only | mAfAfAmAmUAAGGCUAGUCCGUUAmUmCmAmAmCmUmUmGmAmAmAm |
| | | AmAmGmUmGmGmCmAmCmCmGmAmGmUmCmGmGmUmGmCmU*mU*mU |
| | | *mU |
| 423 | G000348- | GUUUUAGAmGmCmUmAmGmAmAmAmUmAmGmCAAGUUAAAAUAAGGC |
| | mod only | UAGUCCGUUAUCAmAmCmUmUmGmAmAmAmAmAmGmUmGmGmCmAmC |
| | | mCmGmAmGmUmCmGmGmUmGmCmUmUmUmU |
| 424 | G000349- | GUUUUAGAmGmCmUmAmGmAmAmAmUmAmGmCAAGUUAAAAUAAGGC |
| | mod only | UAGUCCGUUAUCAmAmCmUmUmGmAmAmAmAmAmGmUmGmGmCmAmC |
| | | mCmGmAmGmUmCmGmGmUmGmCmUmU*mU*mU |
| 425 | G000350- | GUUUUAGAmGmCmUmAmGmAmAmAmUmAmGmCAAGUUAAAAUAAGGC |
| | mod only | UAGUCCGUUAUCAmAmCmUmUmGmAmAmAmAmAmGmUmGmGmCmAmC |
| | | mCmGmAmGfUfCfGfGfUfGfCfU*fU*fU*mU |
| 426 | G000351- | GUUUUAGAmGmCmUmAmGmAmAmAmUmAmGmCAAGUUAAAAUAAGGC |
| | mod only | UAGUCCGUUAUCAfAmCfUmUfGmAfAmAfAmAfGmUfGmGfCmAfCmCfGmA |
| | | fGmUfCmGfGmUfGmCfU*mU*fU*mU |
| 427 | G000352- | mGUUUUmAGAmGmCmUmAmGmAmAmAmUmAmGmCAAGUUAAAAUAAG |
| | mod only | GCUAGUCCGUUAUCAmAmCmUmUmGmAmAmAmAmAmGmUmGmGmCmA |
| | | mCmCmGmAmGmUmCmGmGmUmGmCmU*mU*mU*mU |
| 428 | G000353- | fGfUfUfUfUfAGAmGmCmUmAmGmAmAmAmUmAmGmCAAGUUAAAAUAA |
| | mod only | GGCUAGUCCGUUAUCAmAmCmUmUmGmAmAmAmAmAmGmUmGmGmCm |
| | | AmCmCmGmAmGmUmCmGmGmUmGmCmU*mU*mU*mU |
| 429 | G000354- | mGfUfUfUfUmAGAmGmCmUmAmGmAmAmAmUmAmGmCAAGUUAAAAUA |
| | mod only | AGGCUAGUCCGUUAUCAmAmCmUmUmGmAmAmAmAmAmGmUmGmGmC |
| | | mAmCmCmGmAmGmUmCmGmGmUmGmCmU*mU*mU*mU |
| 430 | G000355- | GUUUUAGAmGmCmUmAmGmAmAmAmUmAmGmCAAGUmUmAAAmAmUA |
| | mod only | AGGCUAGUCCGUUAUCAmAmCmUmUmGmAmAmAmAmAmGmUmGmGmC |
| | | mAmCmCmGmAmGmUmCmGmGmUmGmCmU*mU*mU*mU |
| 431 | G000356- | GUUUUAGAmGmCmUmAmGmAmAmAmUmAmGmCAAGUmUmAfAfAmAmU |
| | mod only | AAGGCUAGUCCGUUAUCAmAmCmUmUmGmAmAmAmAmAmGmUmGmGm |
| | | CmAmCmCmGmAmGmUmCmGmGmUmGmCmU*mU*mU*mU |
| 432 | G000357- | GUUUUAGAmGmCmUmAmGmAmAmAmUmAmGmCAAGUfUmAfAmAfAmU |
| | mod only | AAGGCUAGUCCGUUAUCAmAmCmUmUmGmAmAmAmAmAmGmUmGmGm |
| | | CmAmCmCmGmAmGmUmCmGmGmUmGmCmU*mU*mU*mU |
| 433 | G000358- | mGUUUUmAGAmGmCmUmAmGmAmAmAmUmAmGmCAAGUmUmAAAmA |
| | mod only | mUAAGGCUAGUCCGUUAUCAmAmCmUmUmGmAmAmAmAmAmGmUmGm |
| | | GmCmAmCmCmGmAmGmUmCmGmGmUmGmCmU*mU*mU*mU |
| 434 | G000359- | mGUUUUmAGAmGmCmUmAmGmAmAmAmUmAmGmCAAGUmUmAfAfAmA |
| | mod only | mUAAGGCUAGUCCGUUAUCAmAmCmUmUmGmAmAmAmAmAmGmUmGm |
| | | GmCmAmCmCmGmAmGmUmCmGmGmUmGmCmU*mU*mU*mU |
| 435 | G000360- | mGUUUUmAGAmGmCmUmAmGmAmAmAmUmAmGmCAAGUfUmAfAmAfA |
| | mod only | mUAAGGCUAGUCCGUUAUCAmAmCmUmUmGmAmAmAmAmAmGmUmGm |
| | | GmCmAmCmCmGmAmGmUmCmGmGmUmGmCmU*mU*mU*mU |
| 436 | G000361- | fGfUfUfUfUfAGAmGmCmUmAmGmAmAmAmUmAmGmCAAGUmUmAAAmA |
| | mod only | mUAAGGCUAGUCCGUUAUCAmAmCmUmUmGmAmAmAmAmAmGmUmGm |
| | | GmCmAmCmCmGmAmGmUmCmGmGmUmGmCmU*mU*mU*mU |
| 437 | G000362- | fGfUfUfUfUfAGAmGmCmUmAmGmAmAmAmUmAmGmCAAGUmUmAfAfAm |
| | mod only | AmUAAGGCUAGUCCGUUAUCAmAmCmUmUmGmAmAmAmAmAmGmUmG |
| | | mGmCmAmCmCmGmAmGmUmCmGmGmUmGmCmU*mU*mU*mU |
| 438 | G000363- | fGfUfUfUfUfAGAmGmCmUmAmGmAmAmAmUmAmGmCAAGUfUmAfAmAfA |
| | mod only | mUAAGGCUAGUCCGUUAUCAmAmCmUmUmGmAmAmAmAmAmGmUmGm |
| | | GmCmAmCmCmGmAmGmUmCmGmGmUmGmCmU*mU*mU*mU |
| 439 | G000364- | GUUUUAmGmAmGmCmUmAmGmAmAmAmUmAmGmCAAGUUAAAAUAAG |
| | mod only | GCUAGUCCGUUAUCAmAmCmUmUmGmAmAmAmAmAmGmUmGmGmCmA |
| | | mCmCmGmAmGmUmCmGmGmUmGmCmU*mU*mU*mU |
| 440 | G000365- | GUUUUAGAmGmCmUmAmGmAmAmAmUmAmGmCmAmAmGmUUAAAAUA |
| | mod only | AGGCUAGUCCGUUAUCAmAmCmUmUmGmAmAmAmAmAmGmUmGmGmC |
| | | mAmCmCmGmAmGmUmCmGmGmUmGmCmU*mU*mU*mU |
| 441 | G000366- | GUUUUAGAmGmCmUmAmGmAmAmAmUmAmGmCAAGUUAAAAUAAGGC |
| | mod only | UAGUCCGUUfAfUfCfAmAmCmUmUmGmAmAmAmAmAmGmUmGmGmCmA |
| | | mCmCmGmAmGmUmCmGmGmUmGmCmU*mU*mU*mU |
| 442 | G000367- | GUUUUAGAmGmCmUmAmGmAmAmAmUmAmGmCAAGUUAAAAUAAGGC |
| | mod only | UAGUCCGUUAmUmCmAmAmCmUmUmGmAmAmAmAmAmGmUmGmGmCm |
| | | AmCmCmGmAmGmUmCmGmGmUmGmCmU*mU*mU*mU |
| 443 | G000368- | fGfUfUfUfUfAmGmAmGmCmUmAmGmAmAmAmUmAmGmCmAmAmGmUmU |
| | mod only | mAfAfAmAmUAAGGCUAGUCCGUUAmUmCmAmAmCmUmUmGmAmAmAm |
| | | AmAmGmUmGmGmCmAmCmCmGmAmGmUmCmGmGmUmGmCmU*mU*mU |
| | | *mU |
| 444 | G000369- | GUUUUAGAmGmCmUmAmGmAmAmAmUmAmGmCAAGUUAAAAUAAGGC |
| | mod only | UAGUCCGUUAUCAmAmCmUmUmGmAmAmAmAmAmGmUmGmGmCmAmC |
| | | mCmGmAmGmUmCmGmGmUmGmCmUmUmUmU |
| 445 | G000370- | GUUUUAGAmGmCmUmAmGmAmAmAmUmAmGmCAAGUUAAAAUAAGGC |
| | mod only | UAGUCCGUUAUCAmAmCmUmUmGmAmAmAmAmAmGmUmGmGmCmAmC |
| | | mCmGmAmGmUmCmGmGmUmGmCmUmU*mU*mU |
| 446 | G000371- | GUUUUAGAmGmCmUmAmGmAmAmAmUmAmGmCAAGUUAAAAUAAGGC |
| | mod only | UAGUCCGUUAUCAmAmCmUmUmGmAmAmAmAmAmGmUmGmGmCmAmC |
| | | mCmGmAmGfUfCfGfGfUfGfCfU*fU*fU*mU |
| 447 | G000372- | GUUUUAGAmGmCmUmAmGmAmAmAmUmAmGmCAAGUUAAAAUAAGGC |
| | mod only | UAGUCCGUUAUCAfAmCfUmUfGmAfAmAfAmAfGmUfGmGfCmAfCmCfGmA |
| | | fGmUfCmGfGmUfGmCfU*mU*fU*mU |
| 448 | Exemplary- | mN*mN*mN*mNNN*N*fN*fN*fN*fNNfNfNNNfNfNNN |
| | guide region | |
| | mod only | |
| 449 | Exemplary- | mN*mN*mN*mNNN*N*fN*fN*fN*fNNfNfNNN*fNfNNN |
| | guide region | |
| | mod only | |
| 450 | Exemplary- | GUUUUAGAmGmCmUmAmGmAmAmAmUmAmGmCAAGUUAAAAUAAGGCU |
| | mod only | AGUCCGUUAUCAACUUGGCACCGAGUCGG*mU*mG*mC |

[0306] In some embodiments, the modified sgRNA comprises the following sequence: mN*mN*mN*NNNNNNNNNNNNNNNNNGUUUUAGAmGmCmUmAmGmAmAmAmU mAmGmCAAGUUAAAAUAAGGCUAGUCCGUUAUCAmAmCmUmUmGmAmAmAm AmAmGmUmGmGmCmAmCmCmGmAmGmUmCmGmGmUmGmCmU*mU*mU*mU (SEQ ID NO: 300), where “N” may be any natural or non-natural nucleotide, and wherein the totality of N's comprise an LDHA guide sequence as described in Table 1. For example, encompassed herein is SEQ ID NO: 300, where the N's are replaced with any of the guide sequences disclosed herein in Table 1 (SEQ ID NOs: 1-84).

[0307] Any of the modifications described below may be present in the gRNAs and mRNAs described herein.

[0308] The terms “mA,” “mC,” “mU,” or “mG” may be used to denote a nucleotide that has been modified with 2′-O-Me.

[0309] Modification of 2′-O-methyl can be depicted as follows:

[chemical structure]

[0310] Another chemical modification that has been shown to influence nucleotide sugar rings is halogen substitution. For example, 2′-fluoro (2′-F) substitution on nucleotide sugar rings can increase oligonucleotide binding affinity and nuclease stability.

[0311] In this application, the terms “fA,” “fC,” “fU,” or “fG” may be used to denote a nucleotide that has been substituted with 2′-F.

[0312] Substitution of 2′-F can be depicted as follows:

[chemical structure]

[0313] Phosphorothioate (PS) linkage or bond refers to a bond where a sulfur is substituted for one nonbridging phosphate oxygen in a phosphodiester linkage, for example in the bonds between nucleotides bases. When phosphorothioates are used to generate oligonucleotides, the modified oligonucleotides may also be referred to as S-oligos.

[0314] A “*” may be used to depict a PS modification. In this application, the terms A*, C*, U*, or G* may be used to denote a nucleotide that is linked to the next (e.g., 3′) nucleotide with a PS bond.

[0315] In this application, the terms “mA*,” “mC*,” “mU*,” or “mG*” may be used to denote a nucleotide that has been substituted with 2′-O-Me and that is linked to the next (e.g., 3′) nucleotide with a PS bond.

[0316] The diagram below shows the substitution of S- into a nonbridging phosphate oxygen, generating a PS bond in lieu of a phosphodiester bond:

[chemical structure]

[0317] Abasic nucleotides refer to those which lack nitrogenous bases. The figure below depicts an oligonucleotide with an abasic (also known as apurinic) site that lacks a base:

[chemical structure]

[0318] Inverted bases refer to those with linkages that are inverted from the normal 5′ to 3′ linkage (i.e either a 5′ to 5′ linkage or a 3′ to 3′ linkage). For example:

[chemical structure]

[0319] An abasic nucleotide can be attached with an inverted linkage. For example, an abasic nucleotide may be attached to the terminal 5′ nucleotide via a 5′ to 5′ linkage, or an abasic nucleotide may be attached to the terminal 3′ nucleotide via a 3′ to 3′ linkage. An inverted abasic nucleotide at either the terminal 5′ or 3′ nucleotide may also be called an inverted abasic end cap.

[0320] In some embodiments, one or more of the first three, four, or five nucleotides at the 5′ terminus, and one or more of the last three, four, or five nucleotides at the 3′ terminus are modified. In some embodiments, the modification is a 2′-O-Me, 2′-F, inverted abasic nucleotide, PS bond, or other nucleotide modification well known in the art to increase stability and/or performance.

[0321] In some embodiments, the first four nucleotides at the 5′ terminus, and the last four nucleotides at the 3′ terminus are linked with phosphorothioate (PS) bonds.

[0322] In some embodiments, the first three nucleotides at the 5′ terminus, and the last three nucleotides at the 3′ terminus comprise a 2′-O-methyl (2′-O-Me) modified nucleotide. In some embodiments, the first three nucleotides at the 5′ terminus, and the last three nucleotides at the 3′ terminus comprise a 2′-fluoro (2′-F) modified nucleotide. In some embodiments, the first three nucleotides at the 5′ terminus, and the last three nucleotides at the 3′ terminus comprise an inverted abasic nucleotide.

[0323] In some embodiments, the guide RNA comprises a modified sgRNA. In some embodiments, the sgRNA comprises the modification pattern shown in SEQ ID No: 201, 202, or 203, where N is any natural or non-natural nucleotide, and where the totality of the N's comprise a guide sequence that directs a nuclease to a target sequence in LDHA, e.g., as shown in Table 1.

[0324] In some embodiments, the guide RNA comprises a sgRNA shown in any one of SEQ ID NOs: 1001, 1005, 1007, 1008, 1014, 1023, 1027, 1032, 1045, 1048, 1063, 1067, 1069, 1071, 1074, 1076, 1077, 1078, 1079, and 1081, or modified versions thereof as shown, e.g., in SEQ ID NOs: 2001, 2005, 2007, 2008, 2014, 2023, 2027, 2032, 2045, 2048, 2063, 2067, 2069, 2071, 2074, 2076, 2077, 2078, 2079, and 2081. In some embodiments, the guide RNA comprises a sgRNA comprising any one of the guide sequences of SEQ ID No: 1-84 and 100-192 and the nucleotides of SEQ ID No: 201, 202, or 203, wherein the nucleotides of SEQ ID No: 201, 202, or 203 are on the 3′ end of the guide sequence, and wherein the sgRNA may be modified as shown in Table 3 or SEQ ID NO: 300.

[0325] As noted above, in some embodiments, a composition or formulation disclosed herein comprises an mRNA comprising an open reading frame (ORF) encoding an RNA-guided DNA binding agent, such as a Cas nuclease as described herein. In some embodiments, an mRNA comprising an ORF encoding an RNA-guided DNA binding agent, such as a Cas nuclease, is provided, used, or administered. In some embodiments, the ORF encoding an RNA-guided DNA nuclease is a “modified RNA-guided DNA binding agent ORF” or simply a “modified ORF,” which is used as shorthand to indicate that the ORF is modified.

[0326] In some embodiments, the modified ORF may comprise a modified uridine at least at one, a plurality of, or all uridine positions. In some embodiments, the modified uridine is a uridine modified at the 5 position, e.g., with a halogen, methyl, or ethyl. In some embodiments, the modified uridine is a pseudouridine modified at the 1 position, e.g., with a halogen, methyl, or ethyl. The modified uridine can be, for example, pseudouridine, N1-methyl-pseudouridine, 5-methoxyuridine, 5-iodouridine, or a combination thereof. In some embodiments, the modified uridine is 5-methoxyuridine. In some embodiments, the modified uridine is 5-iodouridine. In some embodiments, the modified uridine is pseudouridine. In some embodiments, the modified uridine is N1-methyl-pseudouridine. In some embodiments, the modified uridine is a combination of pseudouridine and N1-methyl-pseudouridine. In some embodiments, the modified uridine is a combination of pseudouridine and 5-methoxyuridine. In some embodiments, the modified uridine is a combination of N1-methyl pseudouridine and 5-methoxyuridine. In some embodiments, the modified uridine is a combination of 5-iodouridine and N1-methyl-pseudouridine. In some embodiments, the modified uridine is a combination of pseudouridine and 5-iodouridine. In some embodiments, the modified uridine is a combination of 5-iodouridine and 5-methoxyuridine.

[0327] In some embodiments, an mRNA disclosed herein comprises a 5′ cap, such as a Cap0, Cap1, or Cap2. A 5′ cap is generally a 7-methylguanine ribonucleotide (which may be further modified, as discussed below e.g. with respect to ARCA) linked through a 5′-triphosphate to the 5′ position of the first nucleotide of the 5′-to-3′ chain of the mRNA, i.e., the first cap-proximal nucleotide. In Cap0, the riboses of the first and second cap-proximal nucleotides of the mRNA both comprise a 2′-hydroxyl. In Cap1, the riboses of the first and second transcribed nucleotides of the mRNA comprise a 2′-methoxy and a 2′-hydroxyl, respectively. In Cap2, the riboses of the first and second cap-proximal nucleotides of the mRNA both comprise a 2′-methoxy. See, e.g., Katibah et al. (2014) Proc Natl Acad Sci USA 111(33):12025-30; Abbas et al. (2017) Proc Natl Acad Sci USA 114(11):E2106-E2115. Most endogenous higher eukaryotic mRNAs, including mammalian mRNAs such as human mRNAs, comprise Cap1 or Cap2. Cap0 and other cap structures differing from Cap1 and Cap2 may be immunogenic in mammals, such as humans, due to recognition as “non-self” by components of the innate immune system such as IFIT-1 and IFIT-5, which can result in elevated cytokine levels including type I interferon. Components of the innate immune system such as IFIT-1 and IFIT-5 may also compete with eIF4E for binding of an mRNA with a cap other than Cap1 or Cap2, potentially inhibiting translation of the mRNA.

[0328] A cap can be included co-transcriptionally. For example, ARCA (anti-reverse cap analog; Thermo Fisher Scientific Cat. No. AM8045) is a cap analog comprising a 7-methylguanine 3′-methoxy-5′-triphosphate linked to the 5′ position of a guanine ribonucleotide which can be incorporated in vitro into a transcript at initiation. ARCA results in a Cap0 cap in which the 2′ position of the first cap-proximal nucleotide is hydroxyl. See, e.g., Stepinski et al., (2001) “Synthesis and properties of mRNAs containing the novel ‘anti-reverse’ cap analogs 7-methyl(3′-O-methyl)GpppG and 7-methyl(3′deoxy)GpppG,” RNA 7: 1486-1495. The ARCA structure is shown below.

[chemical structure]

[0329] CleanCap™ AG (m7G(5′)ppp(5′)(2′OMeA)pG; TriLink Biotechnologies Cat. No. N-7113) or CleanCap™ GG (m7G(5′)ppp(5′)(2′OMeG)pG; TriLink Biotechnologies Cat. No. N-7133) can be used to provide a Cap1 structure co-transcriptionally. 3′-O-methylated versions of CleanCap™ AG and CleanCap™ GG are also available from TriLink Biotechnologies as Cat. Nos. N-7413 and N-7433, respectively. The CleanCap™ AG structure is shown below.

[chemical structure]

[0330] Alternatively, a cap can be added to an RNA post-transcriptionally. For example, Vaccinia capping enzyme is commercially available (New England Biolabs Cat. No. M2080S) and has RNA triphosphatase and guanylyltransferase activities, provided by its D1 subunit, and guanine methyltransferase, provided by its D12 subunit. As such, it can add a 7-methylguanine to an RNA, so as to give Cap0, in the presence of S-adenosyl methionine and GTP. See, e.g., Guo, P. and Moss, B. (1990) Proc. Natl. Acad. Sci. USA 87, 4023-4027; Mao, X. and Shuman, S. (1994) J. Biol. Chem. 269, 24472-24479.

[0331] In some embodiments, the mRNA further comprises a poly-adenylated (poly-A) tail. In some embodiments, the poly-A tail comprises at least 20, 30, 40, 50, 60, 70, 80, 90, or 100 adenines, optionally up to 300 adenines. In some embodiments, the poly-A tail comprises 95, 96, 97, 98, 99, or 100 adenine nucleotides.

### D. Ribonucleoprotein Complex

[0332] In some embodiments, a composition is encompassed comprising one or more gRNAs comprising one or more guide sequences from Table 1 or one or more sgRNAs from Table 2 and an RNA-guided DNA binding agent, e.g., a nuclease, such as a Cas nuclease, such as Cas9. In some embodiments, the RNA-guided DNA-binding agent has cleavase activity, which can also be referred to as double-strand endonuclease activity. In some embodiments, the RNA-guided DNA-binding agent comprises a Cas nuclease. Examples of Cas9 nucleases include those of the type II CRISPR systems of S. pyogenes, S. aureus, and other prokaryotes (see, e.g., the list in the next paragraph), and modified (e.g., engineered or mutant) versions thereof. See, e.g., US2016/0312198 A1; US 2016/0312199 A1. Other examples of Cas nucleases include a Csm or Cmr complex of a type III CRISPR system or the Cas10, Csm1, or Cmr2 subunit thereof, and a Cascade complex of a type I CRISPR system, or the Cas3 subunit thereof. In some embodiments, the Cas nuclease may be from a Type-IIA, Type-IIB, or Type-IIC system. For discussion of various CRISPR systems and Cas nucleases see, e.g., Makarova et al., NAT. REV. MICROBIOL. 9:467-477 (2011); Makarova et al., NAT. REV. MICROBIOL, 13: 722-36 (2015); Shmakov et al., MOLECULAR CELL, 60:385-397 (2015).

[0333] Non-limiting exemplary species that the Cas nuclease can be derived from include Streptococcus pyogenes, Streptococcus thermophilus, Streptococcus sp., Staphylococcus aureus, Listeria innocua, Lactobacillus gasseri, Francisella novicida, Wolinella succinogenes, Sutterella wadsworthensis, Gammaproteobacterium, Neisseria meningitidis, Campylobacter jejuni, Pasteurella multocida, Fibrobacter succinogene, Rhodospirillum rubrum, Nocardiopsis dassonvillei, Streptomyces pristinaespiralis, Streptomyces viridochromogenes, Streptomyces viridochromogenes, Streptosporangium roseum, Streptosporangium roseum, Alicyclobacillus acidocaldarius, Bacillus pseudomycoides, Bacillus selenitireducens, Exiguobacterium sibiricum, Lactobacillus delbrueckii, Lactobacillus salivarius, Lactobacillus buchneri, Treponema denticola, Microscilla marina, Burkholderiales bacterium, Polaromonas naphthalenivorans, Polaromonas sp., Crocosphaera watsonii, Cyanothece sp., Microcystis aeruginosa, Synechococcus sp., Acetohalobium arabaticum, Ammonifex degensii, Caldicelulosiruptor becscii, Candidatus Desulforudis, Clostridium botulinum, Clostridium difficile, Finegoldia magna, Natranaerobius thermophilus, Pelotomaculum thermopropionicum, Acidithiobacillus caldus, Acidithiobacillus ferrooxidans, Allochromatium vinosum, Marinobacter sp., Nitrosococcus halophilus, Nitrosococcus watsoni, Pseudoalteromonas haloplanktis, Ktedonobacter racemifer, Methanohalobium evestigatum, Anabaena variabilis, Nodularia spumigena, Nostoc sp., Arthrospira maxima, Arthrospira platensis, Arthrospira sp., Lyngbya sp., Microcoleus chthonoplastes, Oscillatoria sp., Petrotoga mobilis, Thermosipho africanus, Streptococcus pasteurianus, Neisseria cinerea, Campylobacter lari, Parvibaculum lavamentivorans, Corynebacterium diphtheria, Acidaminococcus sp., Lachnospiraceae bacterium ND2006, and Acaryochloris marina.

[0334] In some embodiments, the Cas nuclease is the Cas9 nuclease from Streptococcus pyogenes. In some embodiments, the Cas nuclease is the Cas9 nuclease from Streptococcus thermophilus. In some embodiments, the Cas nuclease is the Cas9 nuclease from Neisseria meningitidis. In some embodiments, the Cas nuclease is the Cas9 nuclease is from Staphylococcus aureus. In some embodiments, the Cas nuclease is the Cpf1 nuclease from Francisella novicida. In some embodiments, the Cas nuclease is the Cpf1 nuclease from Acidaminococcus sp. In some embodiments, the Cas nuclease is the Cpf1 nuclease from Lachnospiraceae bacterium ND2006. In further embodiments, the Cas nuclease is the Cpf1 nuclease from Francisella tularensis, Lachnospiraceae bacterium, Butyrivibrio proteoclasticus, Peregrinibacteria bacterium, Parcubacteria bacterium, Smithella, Acidaminococcus, Candidatus Methanoplasma termitum, Eubacterium eligens, Moraxella bovoculi, Leptospira inadai, Porphyromonas crevioricanis, Prevotella disiens, or Porphyromonas macacae. In certain embodiments, the Cas nuclease is a Cpf1 nuclease from an Acidaminococcus or Lachnospiraceae.

[0335] In some embodiments, the gRNA together with an RNA-guided DNA binding agent is called a ribonucleoprotein complex (RNP). In some embodiments, the RNA-guided DNA binding agent is a Cas nuclease. In some embodiments, the gRNA together with a Cas nuclease is called a Cas RNP. In some embodiments, the RNP comprises Type-I, Type-II, or Type-III components. In some embodiments, the Cas nuclease is the Cas9 protein from the Type-II CRISPR/Cas system. In some embodiment, the gRNA together with Cas9 is called a Cas9 RNP.

[0336] Wild type Cas9 has two nuclease domains: RuvC and HNH. The RuvC domain cleaves the non-target DNA strand, and the HNH domain cleaves the target strand of DNA. In some embodiments, the Cas9 protein comprises more than one RuvC domain and/or more than one HNH domain. In some embodiments, the Cas9 protein is a wild type Cas9. In each of the composition, use, and method embodiments, the Cas induces a double strand break in target DNA.

[0337] In some embodiments, chimeric Cas nucleases are used, where one domain or region of the protein is replaced by a portion of a different protein. In some embodiments, a Cas nuclease domain may be replaced with a domain from a different nuclease such as Fok1. In some embodiments, a Cas nuclease may be a modified nuclease.

[0338] In other embodiments, the Cas nuclease may be from a Type-I CRISPR/Cas system. In some embodiments, the Cas nuclease may be a component of the Cascade complex of a Type-I CRISPR/Cas system. In some embodiments, the Cas nuclease may be a Cas3 protein. In some embodiments, the Cas nuclease may be from a Type-III CRISPR/Cas system. In some embodiments, the Cas nuclease may have an RNA cleavage activity.

[0339] In some embodiments, the RNA-guided DNA-binding agent has single-strand nickase activity, i.e., can cut one DNA strand to produce a single-strand break, also known as a “nick.” In some embodiments, the RNA-guided DNA-binding agent comprises a Cas nickase. A nickase is an enzyme that creates a nick in dsDNA, i.e., cuts one strand but not the other of the DNA double helix. In some embodiments, a Cas nickase is a version of a Cas nuclease (e.g., a Cas nuclease discussed above) in which an endonucleolytic active site is inactivated, e.g., by one or more alterations (e.g., point mutations) in a catalytic domain. See, e.g., U.S. Pat. No. 8,889,356 for discussion of Cas nickases and exemplary catalytic domain alterations. In some embodiments, a Cas nickase such as a Cas9 nickase has an inactivated RuvC or HNH domain.

[0340] In some embodiments, the RNA-guided DNA-binding agent is modified to contain only one functional nuclease domain. For example, the agent protein may be modified such that one of the nuclease domains is mutated or fully or partially deleted to reduce its nucleic acid cleavage activity. In some embodiments, a nickase is used having a RuvC domain with reduced activity. In some embodiments, a nickase is used having an inactive RuvC domain. In some embodiments, a nickase is used having an HNH domain with reduced activity. In some embodiments, a nickase is used having an inactive HNH domain.

[0341] In some embodiments, a conserved amino acid within a Cas protein nuclease domain is substituted to reduce or alter nuclease activity. In some embodiments, a Cas nuclease may comprise an amino acid substitution in the RuvC or RuvC-like nuclease domain. Exemplary amino acid substitutions in the RuvC or RuvC-like nuclease domain include D10A (based on the S. pyogenes Cas9 protein). See, e.g., Zetsche et al. (2015) Cell October 22:163(3): 759-771. In some embodiments, the Cas nuclease may comprise an amino acid substitution in the HNH or HNH-like nuclease domain. Exemplary amino acid substitutions in the HNH or HNH-like nuclease domain include E762A, H840A, N863A, H983A, and D986A (based on the S. pyogenes Cas9 protein). See, e.g., Zetsche et al. (2015). Further exemplary amino acid substitutions include D917A, E1006A, and D1255A (based on the Francisella novicida U112 Cpf1 (FnCpf1) sequence (UniProtKB—AOQ7Q2 (CPF1_FRATN)).

[0342] In some embodiments, an mRNA encoding a nickase is provided in combination with a pair of guide RNAs that are complementary to the sense and antisense strands of the target sequence, respectively. In this embodiment, the guide RNAs direct the nickase to a target sequence and introduce a DSB by generating a nick on opposite strands of the target sequence (i.e., double nicking). In some embodiments, use of double nicking may improve specificity and reduce off-target effects. In some embodiments, a nickase is used together with two separate guide RNAs targeting opposite strands of DNA to produce a double nick in the target DNA. In some embodiments, a nickase is used together with two separate guide RNAs that are selected to be in close proximity to produce a double nick in the target DNA.

[0343] In some embodiments, the RNA-guided DNA-binding agent lacks cleavase and nickase activity. In some embodiments, the RNA-guided DNA-binding agent comprises a dCas DNA-binding polypeptide. A dCas polypeptide has DNA-binding activity while essentially lacking catalytic (cleavase/nickase) activity. In some embodiments, the dCas polypeptide is a dCas9 polypeptide. In some embodiments, the RNA-guided DNA-binding agent lacking cleavase and nickase activity or the dCas DNA-binding polypeptide is a version of a Cas nuclease (e.g., a Cas nuclease discussed above) in which its endonucleolytic active sites are inactivated, e.g., by one or more alterations (e.g., point mutations) in its catalytic domains. See, e.g., US 2014/0186958 A1; US 2015/0166980 A1.

[0344] In some embodiments, the RNA-guided DNA-binding agent comprises one or more heterologous functional domains (e.g., is or comprises a fusion polypeptide).

[0345] In some embodiments, the heterologous functional domain may facilitate transport of the RNA-guided DNA-binding agent into the nucleus of a cell. For example, the heterologous functional domain may be a nuclear localization signal (NLS). In some embodiments, the RNA-guided DNA-binding agent may be fused with 1-10 NLS(s). In some embodiments, the RNA-guided DNA-binding agent may be fused with 1-5 NLS(s). In some embodiments, the RNA-guided DNA-binding agent may be fused with one NLS. Where one NLS is used, the NLS may be linked at the N-terminus or the C-terminus of the RNA-guided DNA-binding agent sequence. It may also be inserted within the RNA-guided DNA binding agent sequence. In other embodiments, the RNA-guided DNA-binding agent may be fused with more than one NLS. In some embodiments, the RNA-guided DNA-binding agent may be fused with 2, 3, 4, or 5 NLSs. In some embodiments, the RNA-guided DNA-binding agent may be fused with two NLSs. In certain circumstances, the two NLSs may be the same (e.g., two SV40 NLSs) or different. In some embodiments, the RNA-guided DNA-binding agent is fused to two SV40 NLS sequences linked at the carboxy terminus. In some embodiments, the RNA-guided DNA-binding agent may be fused with two NLSs, one linked at the N-terminus and one at the C-terminus. In some embodiments, the RNA-guided DNA-binding agent may be fused with 3 NLSs. In some embodiments, the RNA-guided DNA-binding agent may be fused with no NLS. In some embodiments, the NLS may be a monopartite sequence, such as, e.g., the SV40 NLS, PKKKRKV (SEQ ID NO: 600) or PKKKRRV (SEQ ID NO: 601). In some embodiments, the NLS may be a bipartite sequence, such as the NLS of nucleoplasmin, KRPAATKKAGQAKKKK (SEQ ID NO: 602). In a specific embodiment, a single PKKKRKV (SEQ ID NO: 600) NLS may be linked at the C-terminus of the RNA-guided DNA-binding agent. One or more linkers are optionally included at the fusion site.

[0346] In some embodiments, the heterologous functional domain may be capable of modifying the intracellular half-life of the RNA-guided DNA binding agent. In some embodiments, the half-life of the RNA-guided DNA binding agent may be increased. In some embodiments, the half-life of the RNA-guided DNA-binding agent may be reduced. In some embodiments, the heterologous functional domain may be capable of increasing the stability of the RNA-guided DNA-binding agent. In some embodiments, the heterologous functional domain may be capable of reducing the stability of the RNA-guided DNA-binding agent. In some embodiments, the heterologous functional domain may act as a signal peptide for protein degradation. In some embodiments, the protein degradation may be mediated by proteolytic enzymes, such as, for example, proteasomes, lysosomal proteases, or calpain proteases. In some embodiments, the heterologous functional domain may comprise a PEST sequence. In some embodiments, the RNA-guided DNA-binding agent may be modified by addition of ubiquitin or a polyubiquitin chain. In some embodiments, the ubiquitin may be a ubiquitin-like protein (UBL). Non-limiting examples of ubiquitin-like proteins include small ubiquitin-like modifier (SUMO), ubiquitin cross-reactive protein (UCRP, also known as interferon-stimulated gene-15 (ISG15)), ubiquitin-related modifier-1 (URM1), neuronal-precursor-cell-expressed developmentally downregulated protein-8 (NEDD8, also called RubI in S. cerevisiae), human leukocyte antigen F-associated (FAT10), autophagy-8 (ATG8) and -12 (ATG12), Fau ubiquitin-like protein (FUB1), membrane-anchored UBL (MUB), ubiquitin fold-modifier-1 (UFM1), and ubiquitin-like protein-5 (UBL5).

[0347] In some embodiments, the heterologous functional domain may be a marker domain. Non-limiting examples of marker domains include fluorescent proteins, purification tags, epitope tags, and reporter gene sequences. In some embodiments, the marker domain may be a fluorescent protein. Non-limiting examples of suitable fluorescent proteins include green fluorescent proteins (e.g., GFP, GFP-2, tagGFP, turboGFP, sfGFP, EGFP, Emerald, Azami Green, Monomeric Azami Green, CopGFP, AceGFP, ZsGreen1), yellow fluorescent proteins (e.g., YFP, EYFP, Citrine, Venus, YPet, PhiYFP, ZsYellowl), blue fluorescent proteins (e.g., EBFP, EBFP2, Azurite, mKalamal, GFPuv, Sapphire, T-sapphire,), cyan fluorescent proteins (e.g., ECFP, Cerulean, CyPet, AmCyanl, Midoriishi-Cyan), red fluorescent proteins (e.g., mKate, mKate2, mPlum, DsRed monomer, mCherry, mRFP1, DsRed-Express, DsRed2, DsRed-Monomer, HcRed-Tandem, HcRedl, AsRed2, eqFP611, mRasberry, mStrawberry, Jred), and orange fluorescent proteins (mOrange, mKO, Kusabira-Orange, Monomeric Kusabira-Orange, mTangerine, tdTomato) or any other suitable fluorescent protein. In other embodiments, the marker domain may be a purification tag and/or an epitope tag. Non-limiting exemplary tags include glutathione-S-transferase (GST), chitin binding protein (CBP), maltose binding protein (MBP), thioredoxin (TRX), poly(NANP), tandem affinity purification (TAP) tag, myc, AcV5, AUl, AU5, E, ECS, E2, FLAG, HA, nus, Softag 1, Softag 3, Strep, SBP, Glu-Glu, HSV, KT3, S, S1, T7, V5, VSV-G, 6×His, 8×His, biotin carboxyl carrier protein (BCCP), poly-His, and calmodulin. Non-limiting exemplary reporter genes include glutathione-S-transferase (GST), horseradish peroxidase (HRP), chloramphenicol acetyltransferase (CAT), beta-galactosidase, beta-glucuronidase, luciferase, or fluorescent proteins.

[0348] In additional embodiments, the heterologous functional domain may target the RNA-guided DNA-binding agent to a specific organelle, cell type, tissue, or organ. In some embodiments, the heterologous functional domain may target the RNA-guided DNA-binding agent to mitochondria.

[0349] In further embodiments, the heterologous functional domain may be an effector domain. When the RNA-guided DNA-binding agent is directed to its target sequence, e.g., when a Cas nuclease is directed to a target sequence by a gRNA, the effector domain may modify or affect the target sequence. In some embodiments, the effector domain may be chosen from a nucleic acid binding domain, a nuclease domain (e.g., a non-Cas nuclease domain), an epigenetic modification domain, a transcriptional activation domain, or a transcriptional repressor domain. In some embodiments, the heterologous functional domain is a nuclease, such as a Fok1 nuclease. See, e.g., U.S. Pat. No. 9,023,649. In some embodiments, the heterologous functional domain is a transcriptional activator or repressor. See, e.g., Qi et al., “Repurposing CRISPR as an RNA-guided platform for sequence-specific control of gene expression,” Cell 152:1173-83 (2013); Perez-Pinera et al., “RNA-guided gene activation by CRISPR-Cas9-based transcription factors,” Nat. Methods 10:973-6 (2013); Mali et al., “CAS9 transcriptional activators for target specificity screening and paired nickases for cooperative genome engineering,” Nat. Biotechnol. 31:833-8 (2013); Gilbert et al., “CRISPR-mediated modular RNA-guided regulation of transcription in eukaryotes,” Cell 154:442-51 (2013). As such, the RNA-guided DNA-binding agent essentially becomes a transcription factor that can be directed to bind a desired target sequence using a guide RNA.

E. Determination of Efficacy of gRNAs

[0350] In some embodiments, the efficacy of a gRNA is determined when delivered or expressed together with other components forming an RNP. In some embodiments, the gRNA is expressed together with an RNA-guided DNA binding agent, such as a Cas protein, e.g. Cas9. In some embodiments, the gRNA is delivered to or expressed in a cell line that already stably expresses an RNA-guided DNA nuclease, such as a Cas nuclease or nickase, e.g. Cas9 nuclease or nickase. In some embodiments the gRNA is delivered to a cell as part of an RNP. In some embodiments, the gRNA is delivered to a cell along with a mRNA encoding an RNA-guided DNA nuclease, such as a Cas nuclease or nickase, e.g. Cas9 nuclease or nickase.

[0351] As described herein, use of an RNA-guided DNA nuclease and a guide RNA disclosed herein can lead to double-stranded breaks in the DNA which can produce errors in the form of insertion/deletion (indel) mutations upon repair by cellular machinery. Many mutations due to indels alter the reading frame or introduce premature stop codons and, therefore, produce a non-functional protein.

[0352] In some embodiments, the efficacy of particular gRNAs is determined based on in vitro models. In some embodiments, the in vitro model is HEK293 cells stably expressing Cas9 (HEK293_Cas9). In some embodiments, the in vitro model is HUH7 human hepatocarcinoma cells. In some embodiments, the in vitro model is HepG2 cells. In some embodiments, the in vitro model is primary human hepatocytes. In some embodiments, the in vitro model is primary cynomolgus hepatocytes. With respect to using primary human hepatocytes, commercially available primary human hepatocytes can be used to provide greater consistency between experiments. In some embodiments, the number of off-target sites at which a deletion or insertion occurs in an in vitro model (e.g., in primary human hepatocytes) is determined, e.g., by analyzing genomic DNA from primary human hepatocytes transfected in vitro with Cas9 mRNA and the guide RNA. In some embodiments, such a determination comprises analyzing genomic DNA from primary human hepatocytes transfected in vitro with Cas9 mRNA, the guide RNA, and a donor oligonucleotide. Exemplary procedures for such determinations are provided in the working examples below.

[0353] In some embodiments, the efficacy of particular gRNAs is determined across multiple in vitro cell models for a gRNA selection process. In some embodiments, a cell line comparison of data with selected gRNAs is performed. In some embodiments, cross screening in multiple cell models is performed.

[0354] In some embodiments, the efficacy of particular gRNAs is determined based on in vivo models. In some embodiments, the in vivo model is a rodent model. In some embodiments, the rodent model is a mouse which expresses a LDHA gene. In some embodiments, the rodent model is a mouse which expresses a human LDHA gene. In some embodiments, the in vivo model is a non-human primate, for example cynomolgus monkey.

[0355] In some embodiments, the efficacy of a guide RNA is measured by percent editing of LDHA. In some embodiments, the percent editing of LDHA is compared to the percent editing necessary to achieve knockdown of LDHA protein, e.g., from whole cell lysates in the case of an in vitro model or in tissue in the case of an in vivo model.

[0356] In some embodiments, the efficacy of a guide RNA is measured by the number and/or frequency of indels at off-target sequences within the genome of the target cell type. In some embodiments, efficacious guide RNAs are provided which produce indels at off target sites at very low frequencies (e.g., <5%) in a cell population and/or relative to the frequency of indel creation at the target site. Thus, the disclosure provides for guide RNAs which do not exhibit off-target indel formation in the target cell type (e.g., a hepatocyte), or which produce a frequency of off-target indel formation of <5% in a cell population and/or relative to the frequency of indel creation at the target site. In some embodiments, the disclosure provides guide RNAs which do not exhibit any off target indel formation in the target cell type (e.g., hepatocyte). In some embodiments, guide RNAs are provided which produce indels at less than 5 off-target sites, e.g., as evaluated by one or more methods described herein. In some embodiments, guide RNAs are provided which produce indels at less than or equal to 4, 3, 2, or 1 off-target site(s) e.g., as evaluated by one or more methods described herein. In some embodiments, the off-target site(s) does not occur in a protein coding region in the target cell (e.g., hepatocyte) genome.

[0357] In some embodiments, detecting gene editing events, such as the formation of insertion/deletion (“indel”) mutations and homology directed repair (HDR) events in target DNA utilize linear amplification with a tagged primer and isolating the tagged amplification products (herein after referred to as “LAM-PCR,” or “Linear Amplification (LA)” method).

[0358] In some embodiments, the efficacy of a guide RNA is measured by mearing levels of glycolate and/or levels of oxalate in a sample such as a body fluid, e.g., serum, plasma, blood, or urine. In some embodiments, the efficacy of a guide RNA is measured by mearing levels of glycolate in the serum or plasma and/or levels of oxalate in the urine. An increase in the levels of glycolate in the serum or plasma and/or a decrease in the level of oxalate in the urine is indicative of an effective guide RNA. In some embodiments, urinary oxalate is reduced below 0.7 mmol/24 hrs/1.73 m². In some embodiments, levels of glycolate and oxalate are measured using an enzyme-linked immunosorbent assay (ELISA) assay with cell culture media or serum or plasma. In some embodiments, levels of glycolate and oxalate are measured in the same in vitro or in vivo systems or models used to measure editing. In some embodiments, levels of glycolate and oxalate are measured in cells, e.g., primary human hepatocytes. In some embodiments, levels of glycolate and oxalate are measured in H1UH7 cells. In some embodiments, levels of glycolate and oxalate are measured in HepG2 cells.

### III. Therapeutic Methods

[0359] The gRNAs and associated methods and compositions disclosed herein are useful in inducing a double-stranded break (DSB) within the LDHA gene and reducing the expression of the LDHA gene. The gRNAs and associated methods and compositions disclosed herein are useful in treating and preventing hyperoxaluria and preventing symptoms of hyperoxaluria. In some embodiments, the gRNAs disclosed herein are useful in treating and preventing calcium oxalate production, calcium oxalate deposition in organs, primary hyperoxaluria (including PH1, PH2, and PH3), oxalosis, including systemic oxalosis, and hematuria. In some embodiments, the gRNAs disclosed herein are useful in delaying or ameliorating the need for kidney or liver transplant. In some embodiments, the gRNAs disclosed herein are useful in preventing end stage renal disease (ESRD). Administration of the gRNAs disclosed herein will increase serum or plasma glycolate and decrease oxalate production or accumulation so that less oxalate is excreted in the urine. Therefore, in one aspect, effectiveness of treatment/prevention can be assessed by measuring serum or plasma glycolate, wherein an increase in glycolate levels indicates effectiveness. In some embodiments, effectiveness of treatment/prevention can be assessed by measuring oxalate in a sample, such as urinary oxalate, wherein a decrease in urinary oxalate indicates effectiveness.

[0360] Normal daily oxalate excretion in the urine of healthy subjects is less than about 45 mg, while concentrations exceeding about 45 mg per 24 hours are considered to be clinical hyperoxaluria (See e.g., Bhasin et al., World J Nephrol 2015 May 6; 4(2): 235-244; and Cochat P., Rumsby G. (2013). N Engl J Med 369:649-658). Accordingly, in some embodiments, administration of the gRNAs and compositions disclosed herein are useful for reducing levels of oxalate such that a subject no longer exhibits levels of urinary oxalate associated with clinical hyperoxaluria. In some embodiments, administration of the gRNAs and compositions disclosed herein reduces a subject's urinary oxalate to less than about 45 or 40 mg in a 24-hour period. In some embodiments, administration of the gRNAs and compositions disclosed herein reduces a subject's urinary oxalate to less than about 35, less than about 30, less than about 25, less than about 20, less than about 15, or less than about 10 mg in a 24-hour period.

[0361] In some embodiments, any one or more of the gRNAs, compositions, or pharmaceutical formulations described herein is for use in preparing a medicament for treating or preventing a disease or disorder in a subject. In some embodiments, treatment and/or prevention is accomplished with a single dose, e.g., one-time treatment, of medicament/composition. In some embodiments, the disease or disorder is hyperoxaluria.

[0362] In some embodiments, the invention comprises a method of treating or preventing a disease or disorder in subject comprising administering any one or more of the gRNAs, compositions, or pharmaceutical formulations described herein. In some embodiments, the disease or disorder is hyperoxaluria. In some embodiments, the gRNAs, compositions, or pharmaceutical formulations described herein are administered as a single dose, e.g., at one time. In some embodiments, the single dose achieves durable treatment and/or prevention. In some embodiments, the method achieves durable treatment and/or prevention. Durable treatment and/or prevention, as used herein, includes treatment and/or prevention that extends at least i) 3, 4, 5, 6, 7, 8, 9, 10, 11, 12, 13, 14, or 15 weeks; ii) 1, 2, 3, 4, 5, 6, 7, 8, 9, 10, 11, 12, 18, 24, 30, or 36 months; or iii) 1, 2, 3, 4, 5, 6, 7, 8, 9, or 10 years. In some embodiments, a single dose of the gRNAs, compositions, or pharmaceutical formulations described herein is sufficient to treat and/or prevent any of the indications described herein for the duration of the subject's life.

[0363] In some embodiments, the invention comprises a method or use of modifying (e.g., creating a double strand break) a target DNA comprising, administering or delivering any one or more of the gRNAs, compositions, or pharmaceutical formulations described herein. In some embodiments, the target DNA is the LDHA gene. In some embodiments, the target DNA is in an exon of the LDHA gene. In some embodiments, the target DNA is in exon 1, 2, 3, 4, 5, 6, 7, or 8 of the LDHA gene.

[0364] In some embodiments, the invention comprises a method or use for modulation of a target gene comprising, administering or delivering any one or more of the gRNAs, compositions, or pharmaceutical formulations described herein. In some embodiments, the modulation is editing of the LDHA target gene. In some embodiments, the modulation is a change in expression of the protein encoded by the LDHA target gene.

[0365] In some embodiments, the method or use results in gene editing. In some embodiments, the method or use results in a double-stranded break within the target LDHA gene. In some embodiments, the method or use results in formation of indel mutations during non-homologous end joining of the DSB. In some embodiments, the method or use results in an insertion or deletion of nucleotides in a target LDHA gene. In some embodiments, the insertion or deletion of nucleotides in a target LDHA gene leads to a frameshift mutation or premature stop codon that results in a non-functional protein. In some embodiments, the insertion or deletion of nucleotides in a target LDHA gene leads to a knockdown or elimination of target gene expression. In some embodiments, the method or use comprises homology directed repair of a DSB.

[0366] In some embodiments, the method or use results in LDHA gene modulation. In some embodiments, the LDHA gene modulation is a decrease in gene expression. In some embodiments, the method or use results in decreased expression of the protein encoded by the target gene.

[0367] In some embodiments, a method of inducing a double-stranded break (DSB) within the LDHA gene is provided comprising administering a composition comprising a guide RNA comprising any one or more guide sequences of SEQ ID NOs:1-84, or any one or more of the sgRNAs of SEQ ID NOs: 1001, 1005, 1007, 1008, 1014, 1023, 1027, 1032, 1045, 1048, 1063, 1067, 1069, 1071, 1074, 1076, 1077, 1078, 1079, and 1081, or modified versions thereof as shown, e.g., in SEQ ID NOs: 2001, 2005, 2007, 2008, 2014, 2023, 2027, 2032, 2045, 2048, 2063, 2067, 2069, 2071, 2074, 2076, 2077, 2078, 2079, and 2081. In some embodiments, gRNAs comprising any one or more of the guide sequences of SEQ ID NOs:1-84 and 100-192 are administered to induce a DSB in the LDHA gene. The guide RNAs may be administered together with an RNA-guided DNA nuclease such as a Cas nuclease (e.g., Cas9) or an mRNA or vector encoding an RNA-guided DNA nuclease such as a Cas nuclease (e.g., Cas9).

[0368] In some embodiments, a method of modifying the LDHA gene is provided comprising administering a composition comprising a guide RNA comprising any one or more of the guide sequences of SEQ ID NOs:1-84, or any one or more of the sgRNAs of SEQ ID NOs: 1001, 1005, 1007, 1008, 1014, 1023, 1027, 1032, 1045, 1048, 1063, 1067, 1069, 1071, 1074, 1076, 1077, 1078, 1079, and 1081, or modified versions thereof as shown, e.g., in SEQ ID NOs: 2001, 2005, 2007, 2008, 2014, 2023, 2027, 2032, 2045, 2048, 2063, 2067, 2069, 2071, 2074, 2076, 2077, 2078, 2079, and 2081. In some embodiments, gRNAs comprising any one or more of the guide sequences of SEQ ID NOs:1-84, or any one or more of the sgRNAs of SEQ ID NOs: 1001, 1005, 1007, 1008, 1014, 1023, 1027, 1032, 1045, 1048, 1063, 1067, 1069, 1071, 1074, 1076, 1077, 1078, 1079, and 1081, or modified versions thereof as shown, e.g., in SEQ ID NOs: 2001, 2005, 2007, 2008, 2014, 2023, 2027, 2032, 2045, 2048, 2063, 2067, 2069, 2071, 2074, 2076, 2077, 2078, 2079, and 2081, are administered to modify the LDHA gene. The guide RNAs may be administered together with an RNA-guided DNA nuclease such as a Cas nuclease (e.g., Cas9) or an mRNA or vector encoding an RNA-guided DNA nuclease such as a Cas nuclease (e.g., Cas9).

[0369] In some embodiments, a method of treating or preventing hyperoxaluria is provided comprising administering a composition comprising a guide RNA comprising any one or more of the guide sequences of SEQ ID NOs:1-84, or any one or more of the sgRNAs of SEQ ID NOs: 1001, 1005, 1007, 1008, 1014, 1023, 1027, 1032, 1045, 1048, 1063, 1067, 1069, 1071, 1074, 1076, 1077, 1078, 1079, and 1081, or modified versions thereof as shown, e.g., in SEQ ID NOs: 2001, 2005, 2007, 2008, 2014, 2023, 2027, 2032, 2045, 2048, 2063, 2067, 2069, 2071, 2074, 2076, 2077, 2078, 2079, and 2081. In some embodiments, gRNAs comprising any one or more of the guide sequences of SEQ ID NOs:1-84, or any one or more of the sgRNAs of SEQ ID NOs: 1001, 1005, 1007, 1008, 1014, 1023, 1027, 1032, 1045, 1048, 1063, 1067, 1069, 1071, 1074, 1076, 1077, 1078, 1079, and 1081, or modified versions thereof as shown, e.g., in SEQ ID NOs: 2001, 2005, 2007, 2008, 2014, 2023, 2027, 2032, 2045, 2048, 2063, 2067, 2069, 2071, 2074, 2076, 2077, 2078, 2079, and 2081 are administered to treat or prevent hyperoxaluria. The guide RNAs may be administered together with an RNA-guided DNA nuclease such as a Cas nuclease (e.g., Cas9) or an mRNA or vector encoding an RNA-guided DNA nuclease such as a Cas nuclease (e.g., Cas9). In some embodiments, the hyperoxaluria is primary hyperoxaluria. In some embodiments, the primary hyperoxaluria is type 1 (PH1), type 2 (PH2), or type 3 (PH3). In some embodiments, the hyperoxaluria is idiopathic.

[0370] In some embodiments, a method of decreasing or eliminating calcium oxalate production and/or deposition is provided comprising administering a guide RNA comprising any one or more of the guide sequences of SEQ ID NOs:1-84, or any one or more of the sgRNAs of SEQ ID NOs: 1001, 1005, 1007, 1008, 1014, 1023, 1027, 1032, 1045, 1048, 1063, 1067, 1069, 1071, 1074, 1076, 1077, 1078, 1079, and 1081, or modified versions thereof as shown, e.g., in SEQ ID NOs: 2001, 2005, 2007, 2008, 2014, 2023, 2027, 2032, 2045, 2048, 2063, 2067, 2069, 2071, 2074, 2076, 2077, 2078, 2079, and 2081. The guide RNAs may be administered together with an RNA-guided DNA nuclease such as a Cas nuclease (e.g., Cas9) or an mRNA or vector encoding an RNA-guided DNA nuclease such as a Cas nuclease (e.g., Cas9).

[0371] In some embodiments, a method of treating or preventing primary hyperoxaluria, including PH1, PH2, or PH3, is provided comprising administering a guide RNA comprising any one or more of the guide sequences of SEQ ID NOs:1-84, or any one or more of the sgRNAs of SEQ ID NOs: 1001, 1005, 1007, 1008, 1014, 1023, 1027, 1032, 1045, 1048, 1063, 1067, 1069, 1071, 1074, 1076, 1077, 1078, 1079, and 1081, or modified versions thereof as shown, e.g., in SEQ ID NOs: 2001, 2005, 2007, 2008, 2014, 2023, 2027, 2032, 2045, 2048, 2063, 2067, 2069, 2071, 2074, 2076, 2077, 2078, 2079, and 2081. The guide RNAs may be administered together with an RNA-guided DNA nuclease such as a Cas nuclease (e.g., Cas9) or an mRNA or vector encoding an RNA-guided DNA nuclease such as a Cas nuclease (e.g., Cas9).

[0372] In some embodiments, a method of treating or preventing oxalosis, including systemic oxalosis is provided comprising administering a guide RNA comprising any one or more of the guide sequences of SEQ ID NOs:1-84, or any one or more of the sgRNAs of SEQ ID NOs: 1001, 1005, 1007, 1008, 1014, 1023, 1027, 1032, 1045, 1048, 1063, 1067, 1069, 1071, 1074, 1076, 1077, 1078, 1079, and 1081, or modified versions thereof as shown, e.g., in SEQ ID NOs: 2001, 2005, 2007, 2008, 2014, 2023, 2027, 2032, 2045, 2048, 2063, 2067, 2069, 2071, 2074, 2076, 2077, 2078, 2079, and 2081. The guide RNAs may be administered together with an RNA-guided DNA nuclease such as a Cas nuclease (e.g., Cas9) or an mRNA or vector encoding an RNA-guided DNA nuclease such as a Cas nuclease (e.g., Cas9).

[0373] In some embodiments, a method of treating or preventing hematuria is provided comprising administering a guide RNA comprising any one or more of the guide sequences of SEQ ID NOs:1-84, or any one or more of the sgRNAs of SEQ ID NOs: 1001, 1005, 1007, 1008, 1014, 1023, 1027, 1032, 1045, 1048, 1063, 1067, 1069, 1071, 1074, 1076, 1077, 1078, 1079, and 1081, or modified versions thereof as shown, e.g., in SEQ ID NOs: 2001, 2005, 2007, 2008, 2014, 2023, 2027, 2032, 2045, 2048, 2063, 2067, 2069, 2071, 2074, 2076, 2077, 2078, 2079, and 2081. The guide RNAs may be administered together with an RNA-guided DNA nuclease such as a Cas nuclease (e.g., Cas9) or an mRNA or vector encoding an RNA-guided DNA nuclease such as a Cas nuclease (e.g., Cas9).

[0374] In some embodiments, gRNAs comprising any one or more of the guide sequences of SEQ ID NOs:1-84 and 100-192 or any one or more of the sgRNAs of SEQ ID NOs: 1001, 1005, 1007, 1008, 1014, 1023, 1027, 1032, 1045, 1048, 1063, 1067, 1069, 1071, 1074, 1076, 1077, 1078, 1079, and 1081, or modified versions thereof as shown, e.g., in SEQ ID NOs: 2001, 2005, 2007, 2008, 2014, 2023, 2027, 2032, 2045, 2048, 2063, 2067, 2069, 2071, 2074, 2076, 2077, 2078, 2079, and 2081 are administered to reduce oxalate levels in the urine. The gRNAs may be administered together with an RNA-guided DNA nuclease such as a Cas nuclease (e.g., Cas9) or an mRNA or vector encoding an RNA-guided DNA nuclease such as a Cas nuclease (e.g., Cas9).

[0375] In some embodiments, gRNAs comprising any one or more of the guide sequences of SEQ ID NOs:1-84 and 100-192 or any one or more of the sgRNAs of SEQ ID NOs: 1001, 1005, 1007, 1008, 1014, 1023, 1027, 1032, 1045, 1048, 1063, 1067, 1069, 1071, 1074, 1076, 1077, 1078, 1079, and 1081, or modified versions thereof as shown, e.g., in SEQ ID NOs: 2001, 2005, 2007, 2008, 2014, 2023, 2027, 2032, 2045, 2048, 2063, 2067, 2069, 2071, 2074, 2076, 2077, 2078, 2079, and 2081 are administered to increase serum glycolate in the serum or plasma. The gRNAs may be administered together with an RNA-guided DNA nuclease such as a Cas nuclease (e.g., Cas9) or an mRNA or vector encoding an RNA-guided DNA nuclease such as a Cas nuclease (e.g., Cas9).

[0376] In some embodiments, the gRNAs comprising the guide sequences of Table 1 together with an RNA-guided DNA nuclease such as a Cas nuclease induce DSBs, and non-homologous ending joining (NHEJ) during repair leads to a mutation in the LDHA gene. In some embodiments, NHEJ leads to a deletion or insertion of a nucleotide(s), which induces a frame shift or nonsense mutation in the LDHA gene.

[0377] In some embodiments, administering the guide RNAs of the invention (e.g., in a composition provided herein) increases levels (e.g., serum or plasma levels) of glycolate in the subject, and therefore prevents oxalate accumulation.

[0378] In some embodiments, increasing serum glycolate results in a decrease of urinary oxalate. In some embodiments, reduction of urinary oxalate reduces or eliminate calcium oxalate formation and deposition in organs.

[0379] In some embodiments, the subject is mammalian. In some embodiments, the subject is human. In some embodiments, the subject is cow, pig, monkey, sheep, dog, cat, fish, or poultry.

[0380] In some embodiments, the use of a guide RNAs comprising any one or more of the guide sequences in Table 1 or one or more sgRNAs from Table 2 (e.g., in a composition provided herein) is provided for the preparation of a medicament for treating a human subject having hyperoxaluria.

[0381] In some embodiments, the guide RNAs, compositions, and formulations are administered intravenously. In some embodiments, the guide RNAs, compositions, and formulations are administered into the hepatic circulation.

[0382] In some embodiments, a single administration of a composition comprising a guide RNA provided herein is sufficient to knock down expression of the mutant protein. In other embodiments, more than one administration of a composition comprising a guide RNA provided herein may be beneficial to maximize therapeutic effects.

[0383] In some embodiments, treatment slows or halts hyperoxaluria disease progression.

[0384] In some embodiments, treatment slows or halts progression of end stage renal disease (ESRD). In some embodiments, treatment slows or halts the need for kidney and/or liver transplant. In some embodiments, treatment results in improvement, stabilization, or slowing of change in symptoms of hyperoxaluria.

### A. Combination Therapy

[0385] In some embodiments, the invention comprises combination therapies comprising any one of the gRNAs comprising any one or more of the guide sequences disclosed in Table 1 (e.g., in a composition provided herein) together with an additional therapy suitable for alleviating hyperoxaluria and its symptoms, as described above.

[0386] In some embodiments, the additional therapy for hyperoxaluria is vitamin B6, hydration, renal dialysis, or liver or kidney transplant. In some embodiments, the additional therapy is another agent that disrupts the LDHA gene, such as, for example, an siRNA directed to the LDHA gene. In some embodiments the siRNA directed to the LDHA gene is DCR-PHXC. In some embodiments, such as when the hyperoxaluria is caused by PH1, the additional therapy is an agent that disrupts the HAO gene, such as, for example, an siRNA directed to the HA01 gene. In some embodiments, the HAO1 siRNA is lumasiran (ALN-GO1; Alnylam).

[0387] In some embodiments, the combination therapy comprises any one of the gRNAs comprising any one or more of the guide sequences disclosed in Table 1 together with a siRNA that targets HA01 or LDHA. In some embodiments, the siRNA is any siRNA capable of further reducing or eliminating the expression of LDHA. In some embodiments, the siRNA is administered after any one of the gRNAs comprising any one or more of the guide sequences disclosed in Table 1 (e.g., in a composition provided herein). In some embodiments, the siRNA is administered on a regular basis following treatment with any of the gRNA compositions provided herein.

[0388] In some embodiments, the combination therapy comprises any one of the gRNAs comprising any one or more of the guide sequences disclosed in Table 1 (e.g., in a composition provided herein) together with antisense nucleotide that targets LDHA. In some embodiments, the antisense nucleotide is any antisense nucleotide capable of further reducing or eliminating the expression of LDHA. In some embodiments, the antisense nucleotide is administered after any one of the gRNAs comprising any one or more of the guide sequences disclosed in Table 1 (e.g., in a composition provided herein). In some embodiments, the antisense nucleotide is administered on a regular basis following treatment with any of the gRNA compositions provided herein.

B. Delivery of gRNA Compositions

[0389] Lipid nanoparticles (LNPs) are a well-known means for delivery of nucleotide and protein cargo, and may be used for delivery of the guide RNAs, compositions, or pharmaceutical formulations disclosed herein. In some embodiments, the LNPs deliver nucleic acid, protein, or nucleic acid together with protein.

[0390] In some embodiments, the invention comprises a method for delivering any one of the gRNAs disclosed herein to a subject, wherein the gRNA is associated with an LNP. In some embodiments, the gRNA/LNP is also associated with a Cas9 or an mRNA encoding Cas9.

[0391] In some embodiments, the invention comprises a composition comprising any one of the gRNAs disclosed and an LNP. In some embodiments, the composition further comprises a Cas9 or an mRNA encoding Cas9.

[0392] In some embodiments, the LNPs comprise cationic lipids. In some embodiments, the LNPs comprise (9Z,12Z)-3-((4,4-bis(octyloxy)butanoyl)oxy)-2-((((3-(diethylamino)propoxy)carbonyl)oxy)methyl)propyl octadeca-9,12-dienoate, also called 3-((4,4-bis(octyloxy)butanoyl)oxy)-2-((((3-(diethylamino)propoxy)carbonyl)oxy)methyl)propyl (9Z,12Z)-octadeca-9,12-dienoate) or another ionizable lipid. See, e.g., lipids of WO/2017/173054 and references described therein. In some embodiments, the LNPs comprise molar ratios of a cationic lipid amine to RNA phosphate (N.P) of about 4.5, 5.0, 5.5, 6.0, or 6.5. In some embodiments, the term cationic and ionizable in the context of LNP lipids is interchangeable, e.g., wherein ionizable lipids are cationic depending on the pH.

[0393] In some embodiments, LNPs associated with the gRNAs disclosed herein are for use in preparing a medicament for treating a disease or disorder.

[0394] Electroporation is a well-known means for delivery of cargo, and any electroporation methodology may be used for delivery of any one of the gRNAs disclosed herein. In some embodiments, electroporation may be used to deliver any one of the gRNAs disclosed herein and Cas9 or an mRNA encoding Cas9.

[0395] In some embodiments, the invention comprises a method for delivering any one of the gRNAs disclosed herein to an ex vivo cell, wherein the gRNA is associated with an LNP or not associated with an LNP. In some embodiments, the gRNA/LNP or gRNA is also associated with a Cas9 or an mRNA encoding Cas9.

[0396] In some embodiments, the guide RNA compositions described herein, alone or encoded on one or more vectors, are formulated in or administered via a lipid nanoparticle; see e.g., WO/2017/173054, filed Mar. 30, 2017 and published May 10, 2017 entitled “LIPID NANOPARTICLE FORMULATIONS FOR CRISPR/CAS COMPONENTS,” the contents of which are hereby incorporated by reference in their entirety.

[0397] In certain embodiments, the invention comprises DNA or RNA vectors encoding any of the guide RNAs comprising any one or more of the guide sequences described herein. In some embodiments, in addition to guide RNA sequences, the vectors further comprise nucleic acids that do not encode guide RNAs. Nucleic acids that do not encode guide RNA include, but are not limited to, promoters, enhancers, regulatory sequences, and nucleic acids encoding an RNA-guided DNA nuclease, which can be a nuclease such as Cas9. In some embodiments, the vector comprises one or more nucleotide sequence(s) encoding a crRNA, a trRNA, or a crRNA and trRNA. In some embodiments, the vector comprises one or more nucleotide sequence(s) encoding a sgRNA and an mRNA encoding an RNA-guided DNA nuclease, which can be a Cas nuclease, such as Cas9 or Cpf1. In some embodiments, the vector comprises one or more nucleotide sequence(s) encoding a crRNA, a trRNA, and an mRNA encoding an RNA-guided DNA nuclease, which can be a Cas protein, such as, Cas9. In one embodiment, the Cas9 is from Streptococcus pyogenes (i.e., Spy Cas9). In some embodiments, the nucleotide sequence encoding the crRNA, trRNA, or crRNA and trRNA (which may be a sgRNA) comprises or consists of a guide sequence flanked by all or a portion of a repeat sequence from a naturally-occurring CRISPR/Cas system. The nucleic acid comprising or consisting of the crRNA, trRNA, or crRNA and trRNA may further comprise a vector sequence wherein the vector sequence comprises or consists of nucleic acids that are not naturally found together with the crRNA, trRNA, or crRNA and trRNA.

[0398] This description and exemplary embodiments should not be taken as limiting. For the purposes of this specification and appended claims, unless otherwise indicated, all numbers expressing quantities, percentages, or proportions, and other numerical values used in the specification and claims, are to be understood as being modified in all instances by the term “about,” to the extent they are not already so modified. Accordingly, unless indicated to the contrary, the numerical parameters set forth in the following specification and attached claims are approximations that may vary depending upon the desired properties sought to be obtained. At the very least, and not as an attempt to limit the application of the doctrine of equivalents to the scope of the claims, each numerical parameter should at least be construed in light of the number of reported significant digits and by applying ordinary rounding techniques.

[0399] It is noted that, as used in this specification and the appended claims, the singular forms “a,” “an,” and “the,” and any singular use of any word, include plural referents unless expressly and unequivocally limited to one referent. As used herein, the term “include” and its grammatical variants are intended to be non-limiting, such that recitation of items in a list is not to the exclusion of other like items that can be substituted or added to the listed items.

### EXAMPLES

[0400] The following examples are provided to illustrate certain disclosed embodiments and are not to be construed as limiting the scope of this disclosure in any way.

### Example 1—Materials and Methods

In Vitro Transcription (“IVT”) of Nuclease mRNA

[0401] Capped and polyadenylated Streptococcus pyogenes (“Spy”) Cas9 mRNA containing N1-methyl pseudo-U was generated by in vitro transcription using a linearized plasmid DNA template and T7 RNA polymerase. Plasmid DNA containing a T7 promoter and a sequence for transcription (for producing mRNA comprising an mRNA described herein (see SEQ ID NOs: 501-515 in Table 24 below for exemplary ORFs) was linearized by incubating at 37° C. to complete digestion with XbaI with the following conditions: 200 ng/μL plasmid, 2 U/μL XbaI (NEB), and 1× reaction buffer. The XbaI was inactivated by heating the reaction at 65° C. for 20 min. The linearized plasmid was purified from enzyme and buffer salts using a silica maxi spin column (Epoch Life Sciences) and analyzed by agarose gel to confirm linearization. The IVT reaction to generate Cas9 modified mRNA was incubated at 37° C. for 4 hours in the following conditions: 50 ng/μL linearized plasmid; 2 mM each of GTP, ATP, CTP, and N1-methyl pseudo-UTP (Trilink); 10 mM ARCA (Trilink); 5 U/μL T7 RNA polymerase (NEB); 1 U/μL Murine RNase inhibitor (NEB); 0.004 U/μL Inorganic E. coli pyrophosphatase (NEB); and 1× reaction buffer. After the 4-hour incubation, TURBO DNase (ThermoFisher) was added to a final concentration of 0.01 U/μL, and the reaction was incubated for an additional 30 minutes to remove the DNA template. The Cas9 mRNA was purified from enzyme and nucleotides using a MegaClear Transcription Clean-up kit according to the manufacturer's protocol (ThermoFisher). Alternatively, the Cas9 mRNA was purified with a LiCl precipitation method, which in some cases was followed by further purification by tangential flow filtration. The transcript concentration was determined by measuring the light absorbance at 260 nm (Nanodrop), and the transcript was analyzed by capillary electrophoresis by Bioanlayzer (Agilent).

[0402] The sequence for transcription of Cas9 mRNA used in the Examples comprised a sequence selected from SEQ ID NO: 501-515 as shown in Table 24.

TABLE 24
Exemplary Cas9 mRNA Sequences

| SEQ | |
|---|---|
| ID NO | Sequence |
| 501 | GGGTCCCGCAGTCGGCGTCCAGCGGCTCTGCTTGTTCGTGTGTGTGTCGTTGCAGGCCTTATTCGGATCCGCCACCATGGAC |
| | AAGAAGTACAGCATCGGACTGGACATCGGAACAAACAGCGTCGGATGGGCAGTCATCACAGACGAATACAAGGTCCCGAG |
| | CAAGAAGTTCAAGGTCCTGGGAAACACAGACAGACACAGCATCAAGAAGAACCTGATCGGAGCACTGCTGTTCGACAGCG |
| | GAGAAACAGCAGAAGCAACAAGACTGAAGAGAACAGCAAGAAGAAGATACACAAGAAGAAAGAACAGAATCTGCTACCT |
| | GCAGGAAATCTTCAGCAACGAAATGGCAAAGGTCGACGACAGCTTCTTCCACAGACTGGAAGAAAGCTTCCTGGTCGAAG |
| | AAGACAAGAAGCACGAAAGACACCCGATCTTCGGAAACATCGTCGACGAAGTCGCATACCACGAAAAGTACCCGACAATC |
| | TACCACCTGAGAAAGAAGCTGGTCGACAGCACAGACAAGGCAGACCTGAGACTGATCTACCTGGCACTGGCACACATGAT |
| | CAAGTTCAGAGGACACTTCCTGATCGAAGGAGACCTGAACCCGGACAACAGCGACGTCGACAAGCTGTTCATCCAGCTGG |
| | TCCAGACATACAACCAGCTGTTCGAAGAAAACCCGATCAACGCAAGCGGAGTCGACGCAAAGGCAATCCTGAGCGCAAGA |
| | CTGAGCAAGAGCAGAAGACTGGAAAACCTGATCGCACAGCTGCCGGGAGAAAAGAAGAACGGACTGTTCGGAAACCTGA |
| | TCGCACTGAGCCTGGGACTGACACCGAACTTCAAGAGCAACTTCGACCTGGCAGAAGACGCAAAGCTGCAGCTGAGCAAG |
| | GACACATACGACGACGACCTGGACAACCTGCTGGCACAGATCGGAGACCAGTACGCAGACCTGTTCCTGGCAGCAAAGAA |
| | CCTGAGCGACGCAATCCTGCTGAGCGACATCCTGAGAGTCAACACAGAAATCACAAAGGCACCGCTGAGCGCAAGCATGA |
| | TCAAGAGATACGACGAACACCACCAGGACCTGACACTGCTGAAGGCACTGGTCAGACAGCAGCTGCCGGAAAAGTACAAG |
| | GAAATCTTCTTCGACCAGAGCAAGAACGGATACGCAGGATACATCGACGGAGGAGCAAGCCAGGAAGAATTCTACAAGTT |
| | CATCAAGCCGATCCTGGAAAAGATGGACGGAACAGAAGAACTGCTGGTCAAGCTGAACAGAGAAGACCTGCTGAGAAAG |
| | CAGAGAACATTCGACAACGGAAGCATCCCGCACCAGATCCACCTGGGAGAACTGCACGCAATCCTGAGAAGACAGGAAG |
| | ACTTCTACCCGTTCCTGAAGGACAACAGAGAAAAGATCGAAAAGATCCTGACATTCAGAATCCCGTACTACGTCGGACCGC |
| | TGGCAAGAGGAAACAGCAGATTCGCATGGATGACAAGAAAGAGCGAAGAAACAATCACACCGTGGAACTTCGAAGAAGT |
| | CGTCGACAAGGGAGCAAGCGCACAGAGCTTCATCGAAAGAATGACAAACTTCGACAAGAACCTGCCGAACGAAAAGGTCC |
| | TGCCGAAGCACAGCCTGCTGTACGAATACTTCACAGTCTACAACGAACTGACAAAGGTCAAGTACGTCACAGAAGGAATG |
| | AGAAAGCCGGCATTCCTGAGCGGAGAACAGAAGAAGGCAATCGTCGACCTGCTGTTCAAGACAAACAGAAAGGTCACAGT |
| | CAAGCAGCTGAAGGAAGACTACTTCAAGAAGATCGAATGCTTCGACAGCGTCGAAATCAGCGGAGTCGAAGACAGATTCA |
| | ACGCAAGCCTGGGAACATACCACGACCTGCTGAAGATCATCAAGGACAAGGACTTCCTGGACAACGAAGAAAACGAAGAC |
| | ATCCTGGAAGACATCGTCCTGACACTGACACTGTTCGAAGACAGAGAAATGATCGAAGAAAGACTGAAGACATACGCACA |
| | CCTGTTCGACGACAAGGTCATGAAGCAGCTGAAGAGAAGAAGATACACAGGATGGGGAAGACTGAGCAGAAAGCTGATC |
| | AACGGAATCAGAGACAAGCAGAGCGGAAAGACAATCCTGGACTTCCTGAAGAGCGACGGATTCGCAAACAGAAACTTCAT |
| | GCAGCTGATCCACGACGACAGCCTGACATTCAAGGAAGACATCCAGAAGGCACAGGTCAGCGGACAGGGAGACAGCCTG |
| | CACGAACACATCGCAAACCTGGCAGGAAGCCCGGCAATCAAGAAGGGAATCCTGCAGACAGTCAAGGTCGTCGACGAACT |
| | GGTCAAGGTCATGGGAAGACACAAGCCGGAAAACATCGTCATCGAAATGGCAAGAGAAAACCAGACAACACAGAAGGGA |
| | CAGAAGAACAGCAGAGAAAGAATGAAGAGAATCGAAGAAGGAATCAAGGAACTGGGAAGCCAGATCCTGAAGGAACAC |
| | CCGGTCGAAAACACACAGCTGCAGAACGAAAAGCTGTACCTGTACTACCTGCAGAACGGAAGAGACATGTACGTCGACCA |
| | GGAACTGGACATCAACAGACTGAGCGACTACGACGTCGACCACATCGTCCCGCAGAGCTTCCTGAAGGACGACAGCATCG |
| | ACAACAAGGTCCTGACAAGAAGCGACAAGAACAGAGGAAAGAGCGACAACGTCCCGAGCGAAGAAGTCGTCAAGAAGAT |
| | GAAGAACTACTGGAGACAGCTGCTGAACGCAAAGCTGATCACACAGAGAAAGTTCGACAACCTGACAAAGGCAGAGAGA |
| | GGAGGACTGAGCGAACTGGACAAGGCAGGATTCATCAAGAGACAGCTGGTCGAAACAAGACAGATCACAAAGCACGTCG |
| | CACAGATCCTGGACAGCAGAATGAACACAAAGTACGACGAAAACGACAAGCTGATCAGAGAAGTCAAGGTCATCACACTG |
| | AAGAGCAAGCTGGTCAGCGACTTCAGAAAGGACTTCCAGTTCTACAAGGTCAGAGAAATCAACAACTACCACCACGCACA |
| | CGACGCATACCTGAACGCAGTCGTCGGAACAGCACTGATCAAGAAGTACCCGAAGCTGGAAAGCGAATTCGTCTACGGAG |
| | ACTACAAGGTCTACGACGTCAGAAAGATGATCGCAAAGAGCGAACAGGAAATCGGAAAGGCAACAGCAAAGTACTTCTTC |
| | TACAGCAACATCATGAACTTCTTCAAGACAGAAATCACACTGGCAAACGGAGAAATCAGAAAGAGACCGCTGATCGAAAC |
| | AAACGGAGAAACAGGAGAAATCGTCTGGGACAAGGGAAGAGACTTCGCAACAGTCAGAAAGGTCCTGAGCATGCCGCAG |
| | GTCAACATCGTCAAGAAGACAGAAGTCCAGACAGGAGGATTCAGCAAGGAAAGCATCCTGCCGAAGAGAAACAGCGACA |
| | AGCTGATCGCAAGAAAGAAGGACTGGGACCCGAAGAAGTACGGAGGATTCGACAGCCCGACAGTCGCATACAGCGTCCTG |
| | GTCGTCGCAAAGGTCGAAAAGGGAAAGAGCAAGAAGCTGAAGAGCGTCAAGGAACTGCTGGGAATCACAATCATGGAAA |
| | GAAGCAGCTTCGAAAAGAACCCGATCGACTTCCTGGAAGCAAAGGGATACAAGGAAGTCAAGAAGGACCTGATCATCAAG |
| | CTGCCGAAGTACAGCCTGTTCGAACTGGAAAACGGAAGAAAGAGAATGCTGGCAAGCGCAGGAGAACTGCAGAAGGGAA |
| | ACGAACTGGCACTGCCGAGCAAGTACGTCAACTTCCTGTACCTGGCAAGCCACTACGAAAAGCTGAAGGGAAGCCCGGAA |
| | GACAACGAACAGAAGCAGCTGTTCGTCGAACAGCACAAGCACTACCTGGACGAAATCATCGAACAGATCAGCGAATTCAG |
| | CAAGAGAGTCATCCTGGCAGACGCAAACCTGGACAAGGTCCTGAGCGCATACAACAAGCACAGAGACAAGCCGATCAGA |
| | GAACAGGCAGAAAACATCATCCACCTGTTCACACTGACAAACCTGGGAGCACCGGCAGCATTCAAGTACTTCGACACAAC |
| | AATCGACAGAAAGAGATACACAAGCACAAAGGAAGTCCTGGACGCAACACTGATCCACCAGAGCATCACAGGACTGTACG |
| | AAACAAGAATCGACCTGAGCCAGCTGGGAGGAGACGGAGGAGGAAGCCCGAAGAAGAAGAGAAAGGTCTAGCTAGCCAT |
| | CACATTTAAAAGCATCTCAGCCTACCATGAGAATAAGAGAAAGAAAATGAAGATCAATAGCTTATTCATCTCTTTTTCTTTT |
| | TCGTTGGTGTAAAGCCAACACCCTGTCTAAAAAACATAAATTTCTTTAATCATTTTGCCTCTTTTCTCTGTGCTTCAATTAAT |
| | AAAAAATGGAAAGAACCTCGAG |
| 502 | AUGGACAAGAAGUACAGCAUCGGACUGGACAUCGGAACAAACAGCGUCGGAUGGGCAGUCAUCACAGACGAAUACAAG |
| | AGGUCCUGGGAAACACAGACAGACACAGCAUCAAGAAGAACCUGAUCGGAGCACUGCUGUUCGACAGCGGAGAAACAG |
| | GAGAACAGCAAGAAGAAGAUACACAAGAAGAAAGAACAGAAUCUGCUACCUGCAGGAAAUCUUCAGCAACGAAAUGGC |
| | UUCCACAGACUGGAAGAAAGCUUCCUGGUCGAAGAAGACAAGAAGCACGAAAGACACCCGAUCUUCGGAAACAUCGUC |
| | AAAAGUACCCGACAAUCUACCACCUGAGAAAGAAGCUGGUCGACAGCACAGACAAGGCAGACCUGAGACUGAUCUACCU |
| | AAGUUCAGAGGACACUUCCUGAUCGAAGGAGACCUGAACCCGGACAACAGCGACGUCGACAAGCUGUUCAUCCAGCUGG |
| | GUUCGAAGAAAACCCGAUCAACGCAAGCGGAGUCGACGCAAAGGCAAUCCUGAGCGCAAGACUGAGCAAGAGCAGAAG |
| | CAGCUGCCGGGAGAAAAGAAGAACGGACUGUUCGGAAACCUGAUCGCACUGAGCCUGGGACUGACACCGAACUUCAAG |
| | AAGACGCAAAGCUGCAGCUGAGCAAGGACACAUACGACGACGACCUGGACAACCUGCUGGCACAGAUCGGAGACCAGUA |
| | GCAAAGAACCUGAGCGACGCAAUCCUGCUGAGCGACAUCCUGAGAGUCAACACAGAAAUCACAAAGGCACCGCUGAGCG |
| | CGACGAACACCACCAGGACCUGACACUGCUGAAGGCACUGGUCAGACAGCAGCUGCCGGAAAAGUACAAGGAAAUCUU |
| | GGAUACGCAGGAUACAUCGACGGAGGAGCAAGCCAGGAAGAAUUCUACAAGUUCAUCAAGCCGAUCCUGGAAAAGAUG |
| | UGGUCAAGCUGAACAGAGAAGACCUGCUGAGAAAGCAGAGAACAUUCGACAACGGAAGCAUCCCGCACCAGAUCCACC |
| | CCUGAGAAGACAGGAAGACUUCUACCCGUUCCUGAAGGACAACAGAGAAAAGAUCGAAAAGAUCCUGACAUUCAGAAU |
| | CUGGCAAGAGGAAACAGCAGAUUCGCAUGGAUGACAAGAAAGAGCGAAGAAACAAUCACACCGUGGAACUUCGAAGAA |
| | GCGCACAGAGCUUCAUCGAAAGAAUGACAAACUUCGACAAGAACCUGCCGAACGAAAAGGUCCUGCCGAAGCACAGCCU |
| | GUCUACAACGAACUGACAAAGGUCAAGUACGUCACAGAAGGAAUGAGAAAGCCGGCAUUCCUGAGCGGAGAACAGAAG |
| | UGUUCAAGACAAACAGAAAGGUCACAGUCAAGCAGCUGAAGGAAGACUACUUCAAGAAGAUCGAAUGCUUCGACAGCG |
| | AGACAGAUUCAACGCAAGCCUGGGAACAUACCACGACCUGCUGAAGAUCAUCAAGGACAAGGACUUCCUGGACAACGA |
| | GAAGACAUCGUCCUGACACUGACACUGUUCGAAGACAGAGAAAUGAUCGAAGAAAGACUGAAGACAUACGCACACCUG |
| | AGCAGCUGAAGAGAAGAAGAUACACAGGAUGGGGAAGACUGAGCAGAAAGCUGAUCAACGGAAUCAGAGACAAGCAGA |
| | CUUCCUGAAGAGCGACGGAUUCGCAAACAGAAACUUCAUGCAGCUGAUCCACGACGACAGCCUGACAUUCAAGGAAGA |
| | AGCGGACAGGGAGACAGCCUGCACGAACACAUCGCAAACCUGGCAGGAAGCCCGGCAAUCAAGAAGGGAAUCCUGCAGA |
| | ACUGGUCAAGGUCAUGGGAAGACACAAGCCGGAAAACAUCGUCAUCGAAAUGGCAAGAGAAAACCAGACAACACAGAA |
| | GAAAGAAUGAAGAGAAUCGAAGAAGGAAUCAAGGAACUGGGAAGCCAGAUCCUGAAGGAACACCCGGUCGAAAACACA |
| | UGUACCUGUACUACCUGCAGAACGGAAGAGACAUGUACGUCGACCAGGAACUGGACAUCAACAGACUGAGCGACUACG |
| | GCAGAGCUUCCUGAAGGACGACAGCAUCGACAACAAGGUCCUGACAAGAAGCGACAAGAACAGAGGAAAGAGCGACAAC |
| | UCAAGAAGAUGAAGAACUACUGGAGACAGCUGCUGAACGCAAAGCUGAUCACACAGAGAAAGUUCGACAACCUGACAA |
| | GAGCGAACUGGACAAGGCAGGAUUCAUCAAGAGACAGCUGGUCGAAACAAGACAGAUCACAAAGCACGUCGCACAGAU |
| | ACAAAGUACGACGAAAACGACAAGCUGAUCAGAGAAGUCAAGGUCAUCACACUGAAGAGCAAGCUGGUCAGCGACUUC |
| | ACAAGGUCAGAGAAAUCAACAACUACCACCACGCACACGACGCAUACCUGAACGCAGUCGUCGGAACAGCACUGAUCAA |
| | AGCGAAUUCGUCUACGGAGACUACAAGGUCUACGACGUCAGAAAGAUGAUCGCAAAGAGCGAACAGGAAAUCGGAAAG |
| | UCUACAGCAACAUCAUGAACUUCUUCAAGACAGAAAUCACACUGGCAAACGGAGAAAUCAGAAAGAGACCGCUGAUCG |
| | AGAAAUCGUCUGGGACAAGGGAAGAGACUUCGCAACAGUCAGAAAGGUCCUGAGCAUGCCGCAGGUCAACAUCGUCAA |
| | GGAGGAUUCAGCAAGGAAAGCAUCCUGCCGAAGAGAAACAGCGACAAGCUGAUCGCAAGAAAGAAGGACUGGGACCCG |
| | ACAGCCCGACAGUCGCAUACAGCGUCCUGGUCGUCGCAAAGGUCGAAAAGGGAAAGAGCAAGAAGCUGAAGAGCGUCA |
| | AAUCAUGGAAAGAAGCAGCUUCGAAAAGAACCCGAUCGACUUCCUGGAAGCAAAGGGAUACAAGGAAGUCAAGAAGGA |
| | AAGUACAGCCUGUUCGAACUGGAAAACGGAAGAAAGAGAAUGCUGGCAAGCGCAGGAGAACUGCAGAAGGGAAACGAA |
| | ACGUCAACUUCCUGUACCUGGCAAGCCACUACGAAAAGCUGAAGGGAAGCCCGGAAGACAACGAACAGAAGCAGCUGUU |
| | UACCUGGACGAAAUCAUCGAACAGAUCAGCGAAUUCAGCAAGAGAGUCAUCCUGGCAGACGCAAACCUGGACAAGGUCC |
| | CAGAGACAAGCCGAUCAGAGAACAGGCAGAAAACAUCAUCCACCUGUUCACACUGACAAACCUGGGAGCACCGGCAGCA |
| | CAAUCGACAGAAAGAGAUACACAAGCACAAAGGAAGUCCUGGACGCAACACUGAUCCACCAGAGCAUCACAGGACUGU |
| | GAGCCAGCUGGGAGGAGACUAG |
| 503 | GACAAGAAGUACAGCAUCGGACUGGACAUCGGAACAAACAGCGUCGGAUGGGCAGUCAUCACAGACGAAUACAAGGUC |
| | CCGAGCAAGAAGUUCAAGGUCCUGGGAAACACAGACAGACACAGCAUCAAGAAGAACCUGAUCGGAGCACUGCUGUUC |
| | GACAGCGGAGAAACAGCAGAAGCAACAAGACUGAAGAGAACAGCAAGAAGAAGAUACACAAGAAGAAAGAACAGAAUC |
| | UGCUACCUGCAGGAAAUCUUCAGCAACGAAAUGGCAAAGGUCGACGACAGCUUCUUCCACAGACUGGAAGAAAGCUUC |
| | CUGGUCGAAGAAGACAAGAAGCACGAAAGACACCCGAUCUUCGGAAACAUCGUCGACGAAGUCGCAUACCACGAAAAG |
| | UACCCGACAAUCUACCACCUGAGAAAGAAGCUGGUCGACAGCACAGACAAGGCAGACCUGAGACUGAUCUACCUGGCA |
| | CUGGCACACAUGAUCAAGUUCAGAGGACACUUCCUGAUCGAAGGAGACCUGAACCCGGACAACAGCGACGUCGACAAG |
| | CUGUUCAUCCAGCUGGUCCAGACAUACAACCAGCUGUUCGAAGAAAACCCGAUCAACGCAAGCGGAGUCGACGCAAAG |
| | GCAAUCCUGAGCGCAAGACUGAGCAAGAGCAGAAGACUGGAAAACCUGAUCGCACAGCUGCCGGGAGAAAAGAAGAAC |
| | GGACUGUUCGGAAACCUGAUCGCACUGAGCCUGGGACUGACACCGAACUUCAAGAGCAACUUCGACCUGGCAGAAGAC |
| | GCAAAGCUGCAGCUGAGCAAGGACACAUACGACGACGACCUGGACAACCUGCUGGCACAGAUCGGAGACCAGUACGCA |
| | GACCUGUUCCUGGCAGCAAAGAACCUGAGCGACGCAAUCCUGCUGAGCGACAUCCUGAGAGUCAACACAGAAAUCACA |
| | AAGGCACCGCUGAGCGCAAGCAUGAUCAAGAGAUACGACGAACACCACCAGGACCUGACACUGCUGAAGGCACUGGUC |
| | AGACAGCAGCUGCCGGAAAAGUACAAGGAAAUCUUCUUCGACCAGAGCAAGAACGGAUACGCAGGAUACAUCGACGGA |
| | GGAGCAAGCCAGGAAGAAUUCUACAAGUUCAUCAAGCCGAUCCUGGAAAAGAUGGACGGAACAGAAGAACUGCUGGUC |
| | AAGCUGAACAGAGAAGACCUGCUGAGAAAGCAGAGAACAUUCGACAACGGAAGCAUCCCGCACCAGAUCCACCUGGGA |
| | GAACUGCACGCAAUCCUGAGAAGACAGGAAGACUUCUACCCGUUCCUGAAGGACAACAGAGAAAAGAUCGAAAAGAUC |
| | CUGACAUUCAGAAUCCCGUACUACGUCGGACCGCUGGCAAGAGGAAACAGCAGAUUCGCAUGGAUGACAAGAAAGAGC |
| | GAAGAAACAAUCACACCGUGGAACUUCGAAGAAGUCGUCGACAAGGGAGCAAGCGCACAGAGCUUCAUCGAAAGAAUG |
| | ACAAACUUCGACAAGAACCUGCCGAACGAAAAGGUCCUGCCGAAGCACAGCCUGCUGUACGAAUACUUCACAGUCUAC |
| | AACGAACUGACAAAGGUCAAGUACGUCACAGAAGGAAUGAGAAAGCCGGCAUUCCUGAGCGGAGAACAGAAGAAGGCA |
| | AUCGUCGACCUGCUGUUCAAGACAAACAGAAAGGUCACAGUCAAGCAGCUGAAGGAAGACUACUUCAAGAAGAUCGAA |
| | UGCUUCGACAGCGUCGAAAUCAGCGGAGUCGAAGACAGAUUCAACGCAAGCCUGGGAACAUACCACGACCUGCUGAAG |
| | AUCAUCAAGGACAAGGACUUCCUGGACAACGAAGAAAACGAAGACAUCCUGGAAGACAUCGUCCUGACACUGACACUG |
| | UUCGAAGACAGAGAAAUGAUCGAAGAAAGACUGAAGACAUACGCACACCUGUUCGACGACAAGGUCAUGAAGCAGCUG |
| | AAGAGAAGAAGAUACACAGGAUGGGGAAGACUGAGCAGAAAGCUGAUCAACGGAAUCAGAGACAAGCAGAGCGGAAA |
| | GACAAUCCUGGACUUCCUGAAGAGCGACGGAUUCGCAAACAGAAACUUCAUGCAGCUGAUCCACGACGACAGCCUGAC |
| | AUUCAAGGAAGACAUCCAGAAGGCACAGGUCAGCGGACAGGGAGACAGCCUGCACGAACACAUCGCAAACCUGGCAGG |
| | AAGCCCGGCAAUCAAGAAGGGAAUCCUGCAGACAGUCAAGGUCGUCGACGAACUGGUCAAGGUCAUGGGAAGACACAA |
| | GCCGGAAAACAUCGUCAUCGAAAUGGCAAGAGAAAACCAGACAACACAGAAGGGACAGAAGAACAGCAGAGAAAGAAU |
| | GAAGAGAAUCGAAGAAGGAAUCAAGGAACUGGGAAGCCAGAUCCUGAAGGAACACCCGGUCGAAAACACACAGCUGCA |
| | GAACGAAAAGCUGUACCUGUACUACCUGCAGAACGGAAGAGACAUGUACGUCGACCAGGAACUGGACAUCAACAGACU |
| | GAGCGACUACGACGUCGACCACAUCGUCCCGCAGAGCUUCCUGAAGGACGACAGCAUCGACAACAAGGUCCUGACAAG |
| | AAGCGACAAGAACAGAGGAAAGAGCGACAACGUCCCGAGCGAAGAAGUCGUCAAGAAGAUGAAGAACUACUGGAGACA |
| | GCUGCUGAACGCAAAGCUGAUCACACAGAGAAAGUUCGACAACCUGACAAAGGCAGAGAGAGGAGGACUGAGCGAACU |
| | GGACAAGGCAGGAUUCAUCAAGAGACAGCUGGUCGAAACAAGACAGAUCACAAAGCACGUCGCACAGAUCCUGGACAG |
| | CAGAAUGAACACAAAGUACGACGAAAACGACAAGCUGAUCAGAGAAGUCAAGGUCAUCACACUGAAGAGCAAGCUGGU |
| | CAGCGACUUCAGAAAGGACUUCCAGUUCUACAAGGUCAGAGAAAUCAACAACUACCACCACGCACACGACGCAUACCU |
| | GAACGCAGUCGUCGGAACAGCACUGAUCAAGAAGUACCCGAAGCUGGAAAGCGAAUUCGUCUACGGAGACUACAAGGU |
| | CUACGACGUCAGAAAGAUGAUCGCAAAGAGCGAACAGGAAAUCGGAAAGGCAACAGCAAAGUACUUCUUCUACAGCAA |
| | CAUCAUGAACUUCUUCAAGACAGAAAUCACACUGGCAAACGGAGAAAUCAGAAAGAGACCGCUGAUCGAAACAAACGG |
| | AGAAACAGGAGAAAUCGUCUGGGACAAGGGAAGAGACUUCGCAACAGUCAGAAAGGUCCUGAGCAUGCCGCAGGUCAA |
| | CAUCGUCAAGAAGACAGAAGUCCAGACAGGAGGAUUCAGCAAGGAAAGCAUCCUGCCGAAGAGAAACAGCGACAAGCU |
| | GAUCGCAAGAAAGAAGGACUGGGACCCGAAGAAGUACGGAGGAUUCGACAGCCCGACAGUCGCAUACAGCGUCCUGGU |
| | CGUCGCAAAGGUCGAAAAGGGAAAGAGCAAGAAGCUGAAGAGCGUCAAGGAACUGCUGGGAAUCACAAUCAUGGAAAG |
| | AAGCAGCUUCGAAAAGAACCCGAUCGACUUCCUGGAAGCAAAGGGAUACAAGGAAGUCAAGAAGGACCUGAUCAUCAA |
| | GCUGCCGAAGUACAGCCUGUUCGAACUGGAAAACGGAAGAAAGAGAAUGCUGGCAAGCGCAGGAGAACUGCAGAAGGG |
| | AAACGAACUGGCACUGCCGAGCAAGUACGUCAACUUCCUGUACCUGGCAAGCCACUACGAAAAGCUGAAGGGAAGCCC |
| | GGAAGACAACGAACAGAAGCAGCUGUUCGUCGAACAGCACAAGCACUACCUGGACGAAAUCAUCGAACAGAUCAGCGA |
| | AUUCAGCAAGAGAGUCAUCCUGGCAGACGCAAACCUGGACAAGGUCCUGAGCGCAUACAACAAGCACAGAGACAAGCC |
| | GAUCAGAGAACAGGCAGAAAACAUCAUCCACCUGUUCACACUGACAAACCUGGGAGCACCGGCAGCAUUCAAGUACUU |
| | CGACACAACAAUCGACAGAAAGAGAUACACAAGCACAAAGGAAGUCCUGGACGCAACACUGAUCCACCAGAGCAUCAC |
| | AGGACUGUACGAAACAAGAAUCGACCUGAGCCAGCUGGGAGGAGAC |
| 504 | AUGGACAAGAAGUACAGCAUCGGACUGGACAUCGGAACAAACAGCGUCGGAUGGGCAGUCAUCACAGACGAAUACAAG |
| | GUCCCGAGCAAGAAGUUCAAGGUCCUGGGAAACACAGACAGACACAGCAUCAAGAAGAACCUGAUCGGAGCACUGCUG |
| | UUCGACAGCGGAGAAACAGCAGAAGCAACAAGACUGAAGAGAACAGCAAGAAGAAGAUACACAAGAAGAAAGAACAGA |
| | AUCUGCUACCUGCAGGAAAUCUUCAGCAACGAAAUGGCAAAGGUCGACGACAGCUUCUUCCACAGACUGGAAGAAAGC |
| | UUCCUGGUCGAAGAAGACAAGAAGCACGAAAGACACCCGAUCUUCGGAAACAUCGUCGACGAAGUCGCAUACCACGAA |
| | AAGUACCCGACAAUCUACCACCUGAGAAAGAAGCUGGUCGACAGCACAGACAAGGCAGACCUGAGACUGAUCUACCUG |
| | GCACUGGCACACAUGAUCAAGUUCAGAGGACACUUCCUGAUCGAAGGAGACCUGAACCCGGACAACAGCGACGUCGAC |
| | AAGCUGUUCAUCCAGCUGGUCCAGACAUACAACCAGCUGUUCGAAGAAAACCCGAUCAACGCAAGCGGAGUCGACGCA |
| | AAGGCAAUCCUGAGCGCAAGACUGAGCAAGAGCAGAAGACUGGAAAACCUGAUCGCACAGCUGCCGGGAGAAAAGAAG |
| | AACGGACUGUUCGGAAACCUGAUCGCACUGAGCCUGGGACUGACACCGAACUUCAAGAGCAACUUCGACCUGGCAGAA |
| | GACGCAAAGCUGCAGCUGAGCAAGGACACAUACGACGACGACCUGGACAACCUGCUGGCACAGAUCGGAGACCAGUAC |
| | GCAGACCUGUUCCUGGCAGCAAAGAACCUGAGCGACGCAAUCCUGCUGAGCGACAUCCUGAGAGUCAACACAGAAAUC |
| | ACAAAGGCACCGCUGAGCGCAAGCAUGAUCAAGAGAUACGACGAACACCACCAGGACCUGACACUGCUGAAGGCACUG |
| | GUCAGACAGCAGCUGCCGGAAAAGUACAAGGAAAUCUUCUUCGACCAGAGCAAGAACGGAUACGCAGGAUACAUCGAC |
| | GGAGGAGCAAGCCAGGAAGAAUUCUACAAGUUCAUCAAGCCGAUCCUGGAAAAGAUGGACGGAACAGAAGAACUGCUG |
| | GUCAAGCUGAACAGAGAAGACCUGCUGAGAAAGCAGAGAACAUUCGACAACGGAAGCAUCCCGCACCAGAUCCACCUG |
| | GGAGAACUGCACGCAAUCCUGAGAAGACAGGAAGACUUCUACCCGUUCCUGAAGGACAACAGAGAAAAGAUCGAAAAG |
| | AUCCUGACAUUCAGAAUCCCGUACUACGUCGGACCGCUGGCAAGAGGAAACAGCAGAUUCGCAUGGAUGACAAGAAAG |
| | AGCGAAGAAACAAUCACACCGUGGAACUUCGAAGAAGUCGUCGACAAGGGAGCAAGCGCACAGAGCUUCAUCGAAAGA |
| | AUGACAAACUUCGACAAGAACCUGCCGAACGAAAAGGUCCUGCCGAAGCACAGCCUGCUGUACGAAUACUUCACAGUC |
| | UACAACGAACUGACAAAGGUCAAGUACGUCACAGAAGGAAUGAGAAAGCCGGCAUUCCUGAGCGGAGAACAGAAGAAG |
| | GCAAUCGUCGACCUGCUGUUCAAGACAAACAGAAAGGUCACAGUCAAGCAGCUGAAGGAAGACUACUUCAAGAAGAUC |
| | GAAUGCUUCGACAGCGUCGAAAUCAGCGGAGUCGAAGACAGAUUCAACGCAAGCCUGGGAACAUACCACGACCUGCUG |
| | AAGAUCAUCAAGGACAAGGACUUCCUGGACAACGAAGAAAACGAAGACAUCCUGGAAGACAUCGUCCUGACACUGACA |
| | CUGUUCGAAGACAGAGAAAUGAUCGAAGAAAGACUGAAGACAUACGCACACCUGUUCGACGACAAGGUCAUGAAGCAG |
| | CUGAAGAGAAGAAGAUACACAGGAUGGGGAAGACUGAGCAGAAAGCUGAUCAACGGAAUCAGAGACAAGCAGAGCGG |
| | AAAGACAAUCCUGGACUUCCUGAAGAGCGACGGAUUCGCAAACAGAAACUUCAUGCAGCUGAUCCACGACGACAGCCU |
| | GACAUUCAAGGAAGACAUCCAGAAGGCACAGGUCAGCGGACAGGGAGACAGCCUGCACGAACACAUCGCAAACCUGGC |
| | AGGAAGCCCGGCAAUCAAGAAGGGAAUCCUGCAGACAGUCAAGGUCGUCGACGAACUGGUCAAGGUCAUGGGAAGACA |
| | CAAGCCGGAAAACAUCGUCAUCGAAAUGGCAAGAGAAAACCAGACAACACAGAAGGGACAGAAGAACAGCAGAGAAAG |
| | AAUGAAGAGAAUCGAAGAAGGAAUCAAGGAACUGGGAAGCCAGAUCCUGAAGGAACACCCGGUCGAAAACACACAGCU |
| | GCAGAACGAAAAGCUGUACCUGUACUACCUGCAGAACGGAAGAGACAUGUACGUCGACCAGGAACUGGACAUCAACAG |
| | ACUGAGCGACUACGACGUCGACCACAUCGUCCCGCAGAGCUUCCUGAAGGACGACAGCAUCGACAACAAGGUCCUGAC |
| | AAGAAGCGACAAGAACAGAGGAAAGAGCGACAACGUCCCGAGCGAAGAAGUCGUCAAGAAGAUGAAGAACUACUGGAG |
| | ACAGCUGCUGAACGCAAAGCUGAUCACACAGAGAAAGUUCGACAACCUGACAAAGGCAGAGAGAGGAGGACUGAGCGA |
| | ACUGGACAAGGCAGGAUUCAUCAAGAGACAGCUGGUCGAAACAAGACAGAUCACAAAGCACGUCGCACAGAUCCUGGA |
| | CAGCAGAAUGAACACAAAGUACGACGAAAACGACAAGCUGAUCAGAGAAGUCAAGGUCAUCACACUGAAGAGCAAGCU |
| | GGUCAGCGACUUCAGAAAGGACUUCCAGUUCUACAAGGUCAGAGAAAUCAACAACUACCACCACGCACACGACGCAUA |
| | CCUGAACGCAGUCGUCGGAACAGCACUGAUCAAGAAGUACCCGAAGCUGGAAAGCGAAUUCGUCUACGGAGACUACAA |
| | GGUCUACGACGUCAGAAAGAUGAUCGCAAAGAGCGAACAGGAAAUCGGAAAGGCAACAGCAAAGUACUUCUUCUACAG |
| | CAACAUCAUGAACUUCUUCAAGACAGAAAUCACACUGGCAAACGGAGAAAUCAGAAAGAGACCGCUGAUCGAAACAAA |
| | CGGAGAAACAGGAGAAAUCGUCUGGGACAAGGGAAGAGACUUCGCAACAGUCAGAAAGGUCCUGAGCAUGCCGCAGGU |
| | CAACAUCGUCAAGAAGACAGAAGUCCAGACAGGAGGAUUCAGCAAGGAAAGCAUCCUGCCGAAGAGAAACAGCGACAA |
| | GCUGAUCGCAAGAAAGAAGGACUGGGACCCGAAGAAGUACGGAGGAUUCGACAGCCCGACAGUCGCAUACAGCGUCCU |
| | GGUCGUCGCAAAGGUCGAAAAGGGAAAGAGCAAGAAGCUGAAGAGCGUCAAGGAACUGCUGGGAAUCACAAUCAUGGA |
| | AAGAAGCAGCUUCGAAAAGAACCCGAUCGACUUCCUGGAAGCAAAGGGAUACAAGGAAGUCAAGAAGGACCUGAUCAU |
| | CAAGCUGCCGAAGUACAGCCUGUUCGAACUGGAAAACGGAAGAAAGAGAAUGCUGGCAAGCGCAGGAGAACUGCAGAA |
| | GGGAAACGAACUGGCACUGCCGAGCAAGUACGUCAACUUCCUGUACCUGGCAAGCCACUACGAAAAGCUGAAGGGAAG |
| | CCCGGAAGACAACGAACAGAAGCAGCUGUUCGUCGAACAGCACAAGCACUACCUGGACGAAAUCAUCGAACAGAUCAG |
| | CGAAUUCAGCAAGAGAGUCAUCCUGGCAGACGCAAACCUGGACAAGGUCCUGAGCGCAUACAACAAGCACAGAGACAA |
| | GCCGAUCAGAGAACAGGCAGAAAACAUCAUCCACCUGUUCACACUGACAAACCUGGGAGCACCGGCAGCAUUCAAGUA |
| | CUUCGACACAACAAUCGACAGAAAGAGAUACACAAGCACAAAGGAAGUCCUGGACGCAACACUGAUCCACCAGAGCAU |
| | CACAGGACUGUACGAAACAAGAAUCGACCUGAGCCAGCUGGGAGGAGACGGAAGCGGAAGCCCGAAGAAGAAGAGAAA |
| | GGUCGACGGAAGCCCGAAGAAGAAGAGAAAGGUCGACAGCGGAUAG |
| 505 | GACAAGAAGUACAGCAUCGGACUGGACAUCGGAACAAACAGCGUCGGAUGGGCAGUCAUCACAGACGAAUACAAGGUC |
| | CCGAGCAAGAAGUUCAAGGUCCUGGGAAACACAGACAGACACAGCAUCAAGAAGAACCUGAUCGGAGCACUGCUGUUC |
| | GACAGCGGAGAAACAGCAGAAGCAACAAGACUGAAGAGAACAGCAAGAAGAAGAUACACAAGAAGAAAGAACAGAAUC |
| | UGCUACCUGCAGGAAAUCUUCAGCAACGAAAUGGCAAAGGUCGACGACAGCUUCUUCCACAGACUGGAAGAAAGCUUC |
| | CUGGUCGAAGAAGACAAGAAGCACGAAAGACACCCGAUCUUCGGAAACAUCGUCGACGAAGUCGCAUACCACGAAAAG |
| | UACCCGACAAUCUACCACCUGAGAAAGAAGCUGGUCGACAGCACAGACAAGGCAGACCUGAGACUGAUCUACCUGGCA |
| | CUGGCACACAUGAUCAAGUUCAGAGGACACUUCCUGAUCGAAGGAGACCUGAACCCGGACAACAGCGACGUCGACAAG |
| | CUGUUCAUCCAGCUGGUCCAGACAUACAACCAGCUGUUCGAAGAAAACCCGAUCAACGCAAGCGGAGUCGACGCAAAG |
| | GCAAUCCUGAGCGCAAGACUGAGCAAGAGCAGAAGACUGGAAAACCUGAUCGCACAGCUGCCGGGAGAAAAGAAGAAC |
| | GGACUGUUCGGAAACCUGAUCGCACUGAGCCUGGGACUGACACCGAACUUCAAGAGCAACUUCGACCUGGCAGAAGAC |
| | GCAAAGCUGCAGCUGAGCAAGGACACAUACGACGACGACCUGGACAACCUGCUGGCACAGAUCGGAGACCAGUACGCA |
| | GACCUGUUCCUGGCAGCAAAGAACCUGAGCGACGCAAUCCUGCUGAGCGACAUCCUGAGAGUCAACACAGAAAUCACA |
| | AAGGCACCGCUGAGCGCAAGCAUGAUCAAGAGAUACGACGAACACCACCAGGACCUGACACUGCUGAAGGCACUGGUC |
| | AGACAGCAGCUGCCGGAAAAGUACAAGGAAAUCUUCUUCGACCAGAGCAAGAACGGAUACGCAGGAUACAUCGACGGA |
| | GGAGCAAGCCAGGAAGAAUUCUACAAGUUCAUCAAGCCGAUCCUGGAAAAGAUGGACGGAACAGAAGAACUGCUGGUC |
| | AAGCUGAACAGAGAAGACCUGCUGAGAAAGCAGAGAACAUUCGACAACGGAAGCAUCCCGCACCAGAUCCACCUGGGA |
| | GAACUGCACGCAAUCCUGAGAAGACAGGAAGACUUCUACCCGUUCCUGAAGGACAACAGAGAAAAGAUCGAAAAGAUC |
| | CUGACAUUCAGAAUCCCGUACUACGUCGGACCGCUGGCAAGAGGAAACAGCAGAUUCGCAUGGAUGACAAGAAAGAGC |
| | GAAGAAACAAUCACACCGUGGAACUUCGAAGAAGUCGUCGACAAGGGAGCAAGCGCACAGAGCUUCAUCGAAAGAAUG |
| | ACAAACUUCGACAAGAACCUGCCGAACGAAAAGGUCCUGCCGAAGCACAGCCUGCUGUACGAAUACUUCACAGUCUAC |
| | AACGAACUGACAAAGGUCAAGUACGUCACAGAAGGAAUGAGAAAGCCGGCAUUCCUGAGCGGAGAACAGAAGAAGGCA |
| | AUCGUCGACCUGCUGUUCAAGACAAACAGAAAGGUCACAGUCAAGCAGCUGAAGGAAGACUACUUCAAGAAGAUCGAA |
| | UGCUUCGACAGCGUCGAAAUCAGCGGAGUCGAAGACAGAUUCAACGCAAGCCUGGGAACAUACCACGACCUGCUGAAG |
| | AUCAUCAAGGACAAGGACUUCCUGGACAACGAAGAAAACGAAGACAUCCUGGAAGACAUCGUCCUGACACUGACACUG |
| | UUCGAAGACAGAGAAAUGAUCGAAGAAAGACUGAAGACAUACGCACACCUGUUCGACGACAAGGUCAUGAAGCAGCUG |
| | AAGAGAAGAAGAUACACAGGAUGGGGAAGACUGAGCAGAAAGCUGAUCAACGGAAUCAGAGACAAGCAGAGCGGAAA |
| | GACAAUCCUGGACUUCCUGAAGAGCGACGGAUUCGCAAACAGAAACUUCAUGCAGCUGAUCCACGACGACAGCCUGAC |
| | AUUCAAGGAAGACAUCCAGAAGGCACAGGUCAGCGGACAGGGAGACAGCCUGCACGAACACAUCGCAAACCUGGCAGG |
| | AAGCCCGGCAAUCAAGAAGGGAAUCCUGCAGACAGUCAAGGUCGUCGACGAACUGGUCAAGGUCAUGGGAAGACACAA |
| | GCCGGAAAACAUCGUCAUCGAAAUGGCAAGAGAAAACCAGACAACACAGAAGGGACAGAAGAACAGCAGAGAAAGAAU |
| | GAAGAGAAUCGAAGAAGGAAUCAAGGAACUGGGAAGCCAGAUCCUGAAGGAACACCCGGUCGAAAACACACAGCUGCA |
| | GAACGAAAAGCUGUACCUGUACUACCUGCAGAACGGAAGAGACAUGUACGUCGACCAGGAACUGGACAUCAACAGACU |
| | GAGCGACUACGACGUCGACCACAUCGUCCCGCAGAGCUUCCUGAAGGACGACAGCAUCGACAACAAGGUCCUGACAAG |
| | AAGCGACAAGAACAGAGGAAAGAGCGACAACGUCCCGAGCGAAGAAGUCGUCAAGAAGAUGAAGAACUACUGGAGACA |
| | GCUGCUGAACGCAAAGCUGAUCACACAGAGAAAGUUCGACAACCUGACAAAGGCAGAGAGAGGAGGACUGAGCGAACU |
| | GGACAAGGCAGGAUUCAUCAAGAGACAGCUGGUCGAAACAAGACAGAUCACAAAGCACGUCGCACAGAUCCUGGACAG |
| | CAGAAUGAACACAAAGUACGACGAAAACGACAAGCUGAUCAGAGAAGUCAAGGUCAUCACACUGAAGAGCAAGCUGGU |
| | CAGCGACUUCAGAAAGGACUUCCAGUUCUACAAGGUCAGAGAAAUCAACAACUACCACCACGCACACGACGCAUACCU |
| | GAACGCAGUCGUCGGAACAGCACUGAUCAAGAAGUACCCGAAGCUGGAAAGCGAAUUCGUCUACGGAGACUACAAGGU |
| | CUACGACGUCAGAAAGAUGAUCGCAAAGAGCGAACAGGAAAUCGGAAAGGCAACAGCAAAGUACUUCUUCUACAGCAA |
| | CAUCAUGAACUUCUUCAAGACAGAAAUCACACUGGCAAACGGAGAAAUCAGAAAGAGACCGCUGAUCGAAACAAACGG |
| | AGAAACAGGAGAAAUCGUCUGGGACAAGGGAAGAGACUUCGCAACAGUCAGAAAGGUCCUGAGCAUGCCGCAGGUCAA |
| | CAUCGUCAAGAAGACAGAAGUCCAGACAGGAGGAUUCAGCAAGGAAAGCAUCCUGCCGAAGAGAAACAGCGACAAGCU |
| | GAUCGCAAGAAAGAAGGACUGGGACCCGAAGAAGUACGGAGGAUUCGACAGCCCGACAGUCGCAUACAGCGUCCUGGU |
| | CGUCGCAAAGGUCGAAAAGGGAAAGAGCAAGAAGCUGAAGAGCGUCAAGGAACUGCUGGGAAUCACAAUCAUGGAAAG |
| | AAGCAGCUUCGAAAAGAACCCGAUCGACUUCCUGGAAGCAAAGGGAUACAAGGAAGUCAAGAAGGACCUGAUCAUCAA |
| | GCUGCCGAAGUACAGCCUGUUCGAACUGGAAAACGGAAGAAAGAGAAUGCUGGCAAGCGCAGGAGAACUGCAGAAGGG |
| | AAACGAACUGGCACUGCCGAGCAAGUACGUCAACUUCCUGUACCUGGCAAGCCACUACGAAAAGCUGAAGGGAAGCCC |
| | GGAAGACAACGAACAGAAGCAGCUGUUCGUCGAACAGCACAAGCACUACCUGGACGAAAUCAUCGAACAGAUCAGCGA |
| | AUUCAGCAAGAGAGUCAUCCUGGCAGACGCAAACCUGGACAAGGUCCUGAGCGCAUACAACAAGCACAGAGACAAGCC |
| | GAUCAGAGAACAGGCAGAAAACAUCAUCCACCUGUUCACACUGACAAACCUGGGAGCACCGGCAGCAUUCAAGUACUU |
| | CGACACAACAAUCGACAGAAAGAGAUACACAAGCACAAAGGAAGUCCUGGACGCAACACUGAUCCACCAGAGCAUCAC |
| | AGGACUGUACGAAACAAGAAUCGACCUGAGCCAGCUGGGAGGAGACGGAAGCGGAAGCCCGAAGAAGAAGAGAAAGGU |
| | CGACGGAAGCCCGAAGAAGAAGAGAAAGGUCGACAGCGGA |
| 506 | GGGTCCCGCAGTCGGCGTCCAGCGGCTCTGCTTGTTCGTGTGTGTGTCGTTGCAGGCCTTATTCGGATCCATGGACAAGAAG |
| | TACAGCATCGGACTGGACATCGGAACAAACAGCGTCGGATGGGCAGTCATCACAGACGAATACAAGGTCCCGAGCAAGAA |
| | GTTCAAGGTCCTGGGAAACACAGACAGACACAGCATCAAGAAGAACCTGATCGGAGCACTGCTGTTCGACAGCGGAGAAA |
| | CAGCAGAAGCAACAAGACTGAAGAGAACAGCAAGAAGAAGATACACAAGAAGAAAGAACAGAATCTGCTACCTGCAGGA |
| | AATCTTCAGCAACGAAATGGCAAAGGTCGACGACAGCTTCTTCCACAGACTGGAAGAAAGCTTCCTGGTCGAAGAAGACA |
| | AGAAGCACGAAAGACACCCGATCTTCGGAAACATCGTCGACGAAGTCGCATACCACGAAAAGTACCCGACAATCTACCAC |
| | CTGAGAAAGAAGCTGGTCGACAGCACAGACAAGGCAGACCTGAGACTGATCTACCTGGCACTGGCACACATGATCAAGTT |
| | CAGAGGACACTTCCTGATCGAAGGAGACCTGAACCCGGACAACAGCGACGTCGACAAGCTGTTCATCCAGCTGGTCCAGA |
| | CATACAACCAGCTGTTCGAAGAAAACCCGATCAACGCAAGCGGAGTCGACGCAAAGGCAATCCTGAGCGCAAGACTGAGC |
| | AAGAGCAGAAGACTGGAAAACCTGATCGCACAGCTGCCGGGAGAAAAGAAGAACGGACTGTTCGGAAACCTGATCGCAC |
| | TGAGCCTGGGACTGACACCGAACTTCAAGAGCAACTTCGACCTGGCAGAAGACGCAAAGCTGCAGCTGAGCAAGGACACA |
| | TACGACGACGACCTGGACAACCTGCTGGCACAGATCGGAGACCAGTACGCAGACCTGTTCCTGGCAGCAAAGAACCTGAG |
| | CGACGCAATCCTGCTGAGCGACATCCTGAGAGTCAACACAGAAATCACAAAGGCACCGCTGAGCGCAAGCATGATCAAGA |
| | GATACGACGAACACCACCAGGACCTGACACTGCTGAAGGCACTGGTCAGACAGCAGCTGCCGGAAAAGTACAAGGAAATC |
| | TTCTTCGACCAGAGCAAGAACGGATACGCAGGATACATCGACGGAGGAGCAAGCCAGGAAGAATTCTACAAGTTCATCAA |
| | GCCGATCCTGGAAAAGATGGACGGAACAGAAGAACTGCTGGTCAAGCTGAACAGAGAAGACCTGCTGAGAAAGCAGAGA |
| | ACATTCGACAACGGAAGCATCCCGCACCAGATCCACCTGGGAGAACTGCACGCAATCCTGAGAAGACAGGAAGACTTCTA |
| | CCCGTTCCTGAAGGACAACAGAGAAAAGATCGAAAAGATCCTGACATTCAGAATCCCGTACTACGTCGGACCGCTGGCAA |
| | GAGGAAACAGCAGATTCGCATGGATGACAAGAAAGAGCGAAGAAACAATCACACCGTGGAACTTCGAAGAAGTCGTCGA |
| | CAAGGGAGCAAGCGCACAGAGCTTCATCGAAAGAATGACAAACTTCGACAAGAACCTGCCGAACGAAAAGGTCCTGCCGA |
| | AGCACAGCCTGCTGTACGAATACTTCACAGTCTACAACGAACTGACAAAGGTCAAGTACGTCACAGAAGGAATGAGAAAG |
| | CCGGCATTCCTGAGCGGAGAACAGAAGAAGGCAATCGTCGACCTGCTGTTCAAGACAAACAGAAAGGTCACAGTCAAGCA |
| | GCTGAAGGAAGACTACTTCAAGAAGATCGAATGCTTCGACAGCGTCGAAATCAGCGGAGTCGAAGACAGATTCAACGCAA |
| | GCCTGGGAACATACCACGACCTGCTGAAGATCATCAAGGACAAGGACTTCCTGGACAACGAAGAAAACGAAGACATCCTG |
| | GAAGACATCGTCCTGACACTGACACTGTTCGAAGACAGAGAAATGATCGAAGAAAGACTGAAGACATACGCACACCTGTT |
| | CGACGACAAGGTCATGAAGCAGCTGAAGAGAAGAAGATACACAGGATGGGGAAGACTGAGCAGAAAGCTGATCAACGGA |
| | ATCAGAGACAAGCAGAGCGGAAAGACAATCCTGGACTTCCTGAAGAGCGACGGATTCGCAAACAGAAACTTCATGCAGCT |
| | GATCCACGACGACAGCCTGACATTCAAGGAAGACATCCAGAAGGCACAGGTCAGCGGACAGGGAGACAGCCTGCACGAA |
| | CACATCGCAAACCTGGCAGGAAGCCCGGCAATCAAGAAGGGAATCCTGCAGACAGTCAAGGTCGTCGACGAACTGGTCAA |
| | GGTCATGGGAAGACACAAGCCGGAAAACATCGTCATCGAAATGGCAAGAGAAAACCAGACAACACAGAAGGGACAGAAG |
| | AACAGCAGAGAAAGAATGAAGAGAATCGAAGAAGGAATCAAGGAACTGGGAAGCCAGATCCTGAAGGAACACCCGGTCG |
| | AAAACACACAGCTGCAGAACGAAAAGCTGTACCTGTACTACCTGCAGAACGGAAGAGACATGTACGTCGACCAGGAACTG |
| | GACATCAACAGACTGAGCGACTACGACGTCGACCACATCGTCCCGCAGAGCTTCCTGAAGGACGACAGCATCGACAACAA |
| | GGTCCTGACAAGAAGCGACAAGAACAGAGGAAAGAGCGACAACGTCCCGAGCGAAGAAGTCGTCAAGAAGATGAAGAAC |
| | TACTGGAGACAGCTGCTGAACGCAAAGCTGATCACACAGAGAAAGTTCGACAACCTGACAAAGGCAGAGAGAGGAGGAC |
| | TGAGCGAACTGGACAAGGCAGGATTCATCAAGAGACAGCTGGTCGAAACAAGACAGATCACAAAGCACGTCGCACAGATC |
| | CTGGACAGCAGAATGAACACAAAGTACGACGAAAACGACAAGCTGATCAGAGAAGTCAAGGTCATCACACTGAAGAGCA |
| | AGCTGGTCAGCGACTTCAGAAAGGACTTCCAGTTCTACAAGGTCAGAGAAATCAACAACTACCACCACGCACACGACGCA |
| | TACCTGAACGCAGTCGTCGGAACAGCACTGATCAAGAAGTACCCGAAGCTGGAAAGCGAATTCGTCTACGGAGACTACAA |
| | GGTCTACGACGTCAGAAAGATGATCGCAAAGAGCGAACAGGAAATCGGAAAGGCAACAGCAAAGTACTTCTTCTACAGCA |
| | ACATCATGAACTTCTTCAAGACAGAAATCACACTGGCAAACGGAGAAATCAGAAAGAGACCGCTGATCGAAACAAACGGA |
| | GAAACAGGAGAAATCGTCTGGGACAAGGGAAGAGACTTCGCAACAGTCAGAAAGGTCCTGAGCATGCCGCAGGTCAACAT |
| | CGTCAAGAAGACAGAAGTCCAGACAGGAGGATTCAGCAAGGAAAGCATCCTGCCGAAGAGAAACAGCGACAAGCTGATC |
| | GCAAGAAAGAAGGACTGGGACCCGAAGAAGTACGGAGGATTCGACAGCCCGACAGTCGCATACAGCGTCCTGGTCGTCGC |
| | AAAGGTCGAAAAGGGAAAGAGCAAGAAGCTGAAGAGCGTCAAGGAACTGCTGGGAATCACAATCATGGAAAGAAGCAGC |
| | TTCGAAAAGAACCCGATCGACTTCCTGGAAGCAAAGGGATACAAGGAAGTCAAGAAGGACCTGATCATCAAGCTGCCGAA |
| | GTACAGCCTGTTCGAACTGGAAAACGGAAGAAAGAGAATGCTGGCAAGCGCAGGAGAACTGCAGAAGGGAAACGAACTG |
| | GCACTGCCGAGCAAGTACGTCAACTTCCTGTACCTGGCAAGCCACTACGAAAAGCTGAAGGGAAGCCCGGAAGACAACGA |
| | ACAGAAGCAGCTGTTCGTCGAACAGCACAAGCACTACCTGGACGAAATCATCGAACAGATCAGCGAATTCAGCAAGAGAG |
| | TCATCCTGGCAGACGCAAACCTGGACAAGGTCCTGAGCGCATACAACAAGCACAGAGACAAGCCGATCAGAGAACAGGC |
| | AGAAAACATCATCCACCTGTTCACACTGACAAACCTGGGAGCACCGGCAGCATTCAAGTACTTCGACACAACAATCGACA |
| | GAAAGAGATACACAAGCACAAAGGAAGTCCTGGACGCAACACTGATCCACCAGAGCATCACAGGACTGTACGAAACAAG |
| | AATCGACCTGAGCCAGCTGGGAGGAGACGGAGGAGGAAGCCCGAAGAAGAAGAGAAAGGTCTAGCTAGCCATCACATTT |
| | AAAAGCATCTCAGCCTACCATGAGAATAAGAGAAAGAAAATGAAGATCAATAGCTTATTCATCTCTTTTTCTTTTTCGTTGG |
| | TGTAAAGCCAACACCCTGTCTAAAAAACATAAATTTCTTTAATCATTTTGCCTCTTTTCTCTGTGCTTCAATTAATAAAAAAT |
| | GGAAAGAACCTCGAG |
| 507 | ATGGACAAGAAGTACAGCATCGGACTGGACATCGGAACAAACAGCGTCGGATGGGCAGTCATCACAGACGAATACAAGGT |
| | CCCGAGCAAGAAGTTCAAGGTCCTGGGAAACACAGACAGACACAGCATCAAGAAGAACCTGATCGGAGCACTGCTGTTCG |
| | ACAGCGGAGAAACAGCAGAAGCAACAAGACTGAAGAGAACAGCAAGAAGAAGATACACAAGAAGAAAGAACAGAATCT |
| | GCTACCTGCAGGAAATCTTCAGCAACGAAATGGCAAAGGTCGACGACAGCTTCTTCCACcggCTGGAAGAAAGCTTCCTGGT |
| | CGAAGAAGACAAGAAGCACGAAAGACACCCGATCTTCGGAAACATCGTCGACGAAGTCGCATACCACGAAAAGTACCCG |
| | ACAATCTACCACCTGAGAAAGAAGCTGGTCGACAGCACAGACAAGGCAGACCTGAGACTGATCTACCTGGCACTGGCACA |
| | CATGATCAAGTTCAGAGGACACTTCCTGATCGAAGGAGACCTGAACCCGGACAACAGCGACGTCGACAAGCTGTTCATCC |
| | AGCTGGTCCAGACATACAACCAGCTGTTCGAAGAAAACCCGATCAACGCAAGCGGAGTCGACGCAAAGGCAATCCTGAGC |
| | GCAAGACTGAGCAAGAGCAGAAGACTGGAAAACCTGATCGCACAGCTGCCGGGAGAAAAGAAGAACGGACTGTTCGGAA |
| | ACCTGATCGCACTGAGCCTGGGACTGACACCGAACTTCAAGAGCAACTTCGACCTGGCAGAAGACGCAAAGCTGCAGCTG |
| | AGCAAGGACACATACGACGACGACCTGGACAACCTGCTGGCACAGATCGGAGACCAGTACGCAGACCTGTTCCTGGCAGC |
| | AAAGAACCTGAGCGACGCAATCCTGCTGAGCGACATCCTGAGAGTCAACACAGAAATCACAAAGGCACCGCTGAGCGCAA |
| | GCATGATCAAGAGATACGACGAACACCACCAGGACCTGACACTGCTGAAGGCACTGGTCAGACAGCAGCTGCCGGAAAAG |
| | TACAAGGAAATCTTCTTCGACCAGAGCAAGAACGGATACGCAGGATACATCGACGGAGGAGCAAGCCAGGAAGAATTCTA |
| | CAAGTTCATCAAGCCGATCCTGGAAAAGATGGACGGAACAGAAGAACTGCTGGTCAAGCTGAACAGAGAAGACCTGCTGA |
| | GAAAGCAGAGAACATTCGACAACGGAAGCATCCCGCACCAGATCCACCTGGGAGAACTGCACGCAATCCTGAGAAGACA |
| | GGAAGACTTCTACCCGTTCCTGAAGGACAACAGAGAAAAGATCGAAAAGATCCTGACATTCAGAATCCCGTACTACGTCG |
| | GACCGCTGGCAAGAGGAAACAGCAGATTCGCATGGATGACAAGAAAGAGCGAAGAAACAATCACACCGTGGAACTTCGA |
| | AGAAGTCGTCGACAAGGGAGCAAGCGCACAGAGCTTCATCGAAAGAATGACAAACTTCGACAAGAACCTGCCGAACGAA |
| | AAGGTCCTGCCGAAGCACAGCCTGCTGTACGAATACTTCACAGTCTACAACGAACTGACAAAGGTCAAGTACGTCACAGA |
| | AGGAATGAGAAAGCCGGCATTCCTGAGCGGAGAACAGAAGAAGGCAATCGTCGACCTGCTGTTCAAGACAAACAGAAAG |
| | GTCACAGTCAAGCAGCTGAAGGAAGACTACTTCAAGAAGATCGAATGCTTCGACAGCGTCGAAATCAGCGGAGTCGAAGA |
| | CAGATTCAACGCAAGCCTGGGAACATACCACGACCTGCTGAAGATCATCAAGGACAAGGACTTCCTGGACAACGAAGAAA |
| | ACGAAGACATCCTGGAAGACATCGTCCTGACACTGACACTGTTCGAAGACAGAGAAATGATCGAAGAAAGACTGAAGACA |
| | TACGCACACCTGTTCGACGACAAGGTCATGAAGCAGCTGAAGAGAAGAAGATACACAGGATGGGGAAGACTGAGCAGAA |
| | AGCTGATCAACGGAATCAGAGACAAGCAGAGCGGAAAGACAATCCTGGACTTCCTGAAGAGCGACGGATTCGCAAACAG |
| | AAACTTCATGCAGCTGATCCACGACGACAGCCTGACATTCAAGGAAGACATCCAGAAGGCACAGGTCAGCGGACAGGGAG |
| | ACAGCCTGCACGAACACATCGCAAACCTGGCAGGAAGCCCGGCAATCAAGAAGGGAATCCTGCAGACAGTCAAGGTCGTC |
| | GACGAACTGGTCAAGGTCATGGGAAGACACAAGCCGGAAAACATCGTCATCGAAATGGCAAGAGAAAACCAGACAACAC |
| | AGAAGGGACAGAAGAACAGCAGAGAAAGAATGAAGAGAATCGAAGAAGGAATCAAGGAACTGGGAAGCCAGATCCTGA |
| | AGGAACACCCGGTCGAAAACACACAGCTGCAGAACGAAAAGCTGTACCTGTACTACCTGCAaAACGGAAGAGACATGTAC |
| | GTCGACCAGGAACTGGACATCAACAGACTGAGCGACTACGACGTCGACCACATCGTCCCGCAGAGCTTCCTGAAGGACGA |
| | CAGCATCGACAACAAGGTCCTGACAAGAAGCGACAAGAACAGAGGAAAGAGCGACAACGTCCCGAGCGAAGAAGTCGTC |
| | AAGAAGATGAAGAACTACTGGAGACAGCTGCTGAACGCAAAGCTGATCACACAGAGAAAGTTCGACAACCTGACAAAGG |
| | CAGAGAGAGGAGGACTGAGCGAACTGGACAAGGCAGGATTCATCAAGAGACAGCTGGTCGAAACAAGACAGATCACAAA |
| | GCACGTCGCACAGATCCTGGACAGCAGAATGAACACAAAGTACGACGAAAACGACAAGCTGATCAGAGAAGTCAAGGTC |
| | ATCACACTGAAGAGCAAGCTGGTCAGCGACTTCAGAAAGGACTTCCAGTTCTACAAGGTCAGAGAAATCAACAACTACCA |
| | CCACGCACACGACGCATACCTGAACGCAGTCGTCGGAACAGCACTGATCAAGAAGTACCCGAAGCTGGAAAGCGAATTCG |
| | TCTACGGAGACTACAAGGTCTACGACGTCAGAAAGATGATCGCAAAGAGCGAACAGGAAATCGGAAAGGCAACAGCAAA |
| | GTACTTCTTCTACAGCAACATCATGAACTTCTTCAAGACAGAAATCACACTGGCAAACGGAGAAATCAGAAAGAGACCGCT |
| | GATCGAAACAAACGGAGAAACAGGAGAAATCGTCTGGGACAAGGGAAGAGACTTCGCAACAGTCAGAAAGGTCCTGAGC |
| | ATGCCGCAGGTCAACATCGTCAAGAAGACAGAAGTCCAGACAGGAGGATTCAGCAAGGAAAGCATCCTGCCGAAGAGAA |
| | ACAGCGACAAGCTGATCGCAAGAAAGAAGGACTGGGACCCGAAGAAGTACGGAGGATTCGACAGCCCGACAGTCGCATA |
| | CAGCGTCCTGGTCGTCGCAAAGGTCGAAAAGGGAAAGAGCAAGAAGCTGAAGAGCGTCAAGGAACTGCTGGGAATCACA |
| | ATCATGGAAAGAAGCAGCTTCGAAAAGAACCCGATCGACTTCCTGGAAGCAAAGGGATACAAGGAAGTCAAGAAGGACC |
| | TGATCATCAAGCTGCCGAAGTACAGCCTGTTCGAACTGGAAAACGGAAGAAAGAGAATGCTGGCAAGCGCAGGAGAACTG |
| | CAGAAGGGAAACGAACTGGCACTGCCGAGCAAGTACGTCAACTTCCTGTACCTGGCAAGCCACTACGAAAAGCTGAAGGG |
| | AAGCCCGGAAGACAACGAACAGAAGCAGCTGTTCGTCGAACAGCACAAGCACTACCTGGACGAAATCATCGAACAGATCA |
| | GCGAATTCAGCAAGAGAGTCATCCTGGCAGACGCAAACCTGGACAAGGTCCTGAGCGCATACAACAAGCACAGAGACAAG |
| | CCGATCAGAGAACAGGCAGAAAACATCATCCACCTGTTCACACTGACAAACCTGGGAGCACCGGCAGCATTCAAGTACTT |
| | CGACACAACAATCGACAGAAAGAGATACACAAGCACAAAGGAAGTCCTGGACGCAACACTGATCCACCAGAGCATCACA |
| | GGACTGTACGAAACAAGAATCGACCTGAGCCAGCTGGGAGGAGACGGAGGAGGAAGCCCGAAGAAGAAGAGAAAGGTCT |
| | AG |
| 508 | ATGGACAAGAAGTACAGCATCGGCCTGGACATCGGCACCAACAGCGTGGGCTGGGCCGTGATCACCGACGAGTACAAGGT |
| | GCCCAGCAAGAAGTTCAAGGTGCTGGGCAACACCGACAGACACAGCATCAAGAAGAACCTGATCGGCGCCCTGCTGTTCG |
| | ACAGCGGCGAGACCGCCGAGGCCACCAGACTGAAGAGAACCGCCAGAAGAAGATACACCAGAAGAAAGAACAGAATCTG |
| | CTACCTGCAGGAGATCTTCAGCAACGAGATGGCCAAGGTGGACGACAGCTTCTTCCACAGACTGGAGGAGAGCTTCCTGGT |
| | GGAGGAGGACAAGAAGCACGAGAGACACCCCATCTTCGGCAACATCGTGGACGAGGTGGCCTACCACGAGAAGTACCCC |
| | ACCATCTACCACCTGAGAAAGAAGCTGGTGGACAGCACCGACAAGGCCGACCTGAGACTGATCTACCTGGCCCTGGCCCA |
| | CATGATCAAGTTCAGAGGCCACTTCCTGATCGAGGGCGACCTGAACCCCGACAACAGCGACGTGGACAAGCTGTTCATCCA |
| | GCTGGTGCAGACCTACAACCAGCTGTTCGAGGAGAACCCCATCAACGCCAGCGGCGTGGACGCCAAGGCCATCCTGAGCG |
| | CCAGACTGAGCAAGAGCAGAAGACTGGAGAACCTGATCGCCCAGCTGCCCGGCGAGAAGAAGAACGGCCTGTTCGGCAA |
| | CCTGATCGCCCTGAGCCTGGGCCTGACCCCCAACTTCAAGAGCAACTTCGACCTGGCCGAGGACGCCAAGCTGCAGCTGAG |
| | CAAGGACACCTACGACGACGACCTGGACAACCTGCTGGCCCAGATCGGCGACCAGTACGCCGACCTGTTCCTGGCCGCCA |
| | AGAACCTGAGCGACGCCATCCTGCTGAGCGACATCCTGAGAGTGAACACCGAGATCACCAAGGCCCCCCTGAGCGCCAGC |
| | ATGATCAAGAGATACGACGAGCACCACCAGGACCTGACCCTGCTGAAGGCCCTGGTGAGACAGCAGCTGCCCGAGAAGTA |
| | CAAGGAGATCTTCTTCGACCAGAGCAAGAACGGCTACGCCGGCTACATCGACGGCGGCGCCAGCCAGGAGGAGTTCTACA |
| | AGTTCATCAAGCCCATCCTGGAGAAGATGGACGGCACCGAGGAGCTGCTGGTGAAGCTGAACAGAGAGGACCTGCTGAGA |
| | AAGCAGAGAACCTTCGACAACGGCAGCATCCCCCACCAGATCCACCTGGGCGAGCTGCACGCCATCCTGAGAAGACAGGA |
| | GGACTTCTACCCCTTCCTGAAGGACAACAGAGAGAAGATCGAGAAGATCCTGACCTTCAGAATCCCCTACTACGTGGGCCC |
| | CCTGGCCAGAGGCAACAGCAGATTCGCCTGGATGACCAGAAAGAGCGAGGAGACCATCACCCCCTGGAACTTCGAGGAGG |
| | TGGTGGACAAGGGCGCCAGCGCCCAGAGCTTCATCGAGAGAATGACCAACTTCGACAAGAACCTGCCCAACGAGAAGGTG |
| | CTGCCCAAGCACAGCCTGCTGTACGAGTACTTCACCGTGTACAACGAGCTGACCAAGGTGAAGTACGTGACCGAGGGCAT |
| | GAGAAAGCCCGCCTTCCTGAGCGGCGAGCAGAAGAAGGCCATCGTGGACCTGCTGTTCAAGACCAACAGAAAGGTGACCG |
| | TGAAGCAGCTGAAGGAGGACTACTTCAAGAAGATCGAGTGCTTCGACAGCGTGGAGATCAGCGGCGTGGAGGACAGATTC |
| | AACGCCAGCCTGGGCACCTACCACGACCTGCTGAAGATCATCAAGGACAAGGACTTCCTGGACAACGAGGAGAACGAGGA |
| | CATCCTGGAGGACATCGTGCTGACCCTGACCCTGTTCGAGGACAGAGAGATGATCGAGGAGAGACTGAAGACCTACGCCC |
| | ACCTGTTCGACGACAAGGTGATGAAGCAGCTGAAGAGAAGAAGATACACCGGCTGGGGCAGACTGAGCAGAAAGCTGAT |
| | CAACGGCATCAGAGACAAGCAGAGCGGCAAGACCATCCTGGACTTCCTGAAGAGCGACGGCTTCGCCAACAGAAACTTCA |
| | TGCAGCTGATCCACGACGACAGCCTGACCTTCAAGGAGGACATCCAGAAGGCCCAGGTGAGCGGCCAGGGCGACAGCCTG |
| | CACGAGCACATCGCCAACCTGGCCGGCAGCCCCGCCATCAAGAAGGGCATCCTGCAGACCGTGAAGGTGGTGGACGAGCT |
| | GGTGAAGGTGATGGGCAGACACAAGCCCGAGAACATCGTGATCGAGATGGCCAGAGAGAACCAGACCACCCAGAAGGGC |
| | CAGAAGAACAGCAGAGAGAGAATGAAGAGAATCGAGGAGGGCATCAAGGAGCTGGGCAGCCAGATCCTGAAGGAGCACC |
| | CCGTGGAGAACACCCAGCTGCAGAACGAGAAGCTGTACCTGTACTACCTGCAGAACGGCAGAGACATGTACGTGGACCAG |
| | GAGCTGGACATCAACAGACTGAGCGACTACGACGTGGACCACATCGTGCCCCAGAGCTTCCTGAAGGACGACAGCATCGA |
| | CAACAAGGTGCTGACCAGAAGCGACAAGAACAGAGGCAAGAGCGACAACGTGCCCAGCGAGGAGGTGGTGAAGAAGATG |
| | AAGAACTACTGGAGACAGCTGCTGAACGCCAAGCTGATCACCCAGAGAAAGTTCGACAACCTGACCAAGGCCGAGAGAGG |
| | CGGCCTGAGCGAGCTGGACAAGGCCGGCTTCATCAAGAGACAGCTGGTGGAGACCAGACAGATCACCAAGCACGTGGCCC |
| | AGATCCTGGACAGCAGAATGAACACCAAGTACGACGAGAACGACAAGCTGATCAGAGAGGTGAAGGTGATCACCCTGAA |
| | GAGCAAGCTGGTGAGCGACTTCAGAAAGGACTTCCAGTTCTACAAGGTGAGAGAGATCAACAACTACCACCACGCCCACG |
| | ACGCCTACCTGAACGCCGTGGTGGGCACCGCCCTGATCAAGAAGTACCCCAAGCTGGAGAGCGAGTTCGTGTACGGCGAC |
| | TACAAGGTGTACGACGTGAGAAAGATGATCGCCAAGAGCGAGCAGGAGATCGGCAAGGCCACCGCCAAGTACTTCTTCTA |
| | CAGCAACATCATGAACTTCTTCAAGACCGAGATCACCCTGGCCAACGGCGAGATCAGAAAGAGACCCCTGATCGAGACCA |
| | ACGGCGAGACCGGCGAGATCGTGTGGGACAAGGGCAGAGACTTCGCCACCGTGAGAAAGGTGCTGAGCATGCCCCAGGTG |
| | AACATCGTGAAGAAGACCGAGGTGCAGACCGGCGGCTTCAGCAAGGAGAGCATCCTGCCCAAGAGAAACAGCGACAAGC |
| | TGATCGCCAGAAAGAAGGACTGGGACCCCAAGAAGTACGGCGGCTTCGACAGCCCCACCGTGGCCTACAGCGTGCTGGTG |
| | GTGGCCAAGGTGGAGAAGGGCAAGAGCAAGAAGCTGAAGAGCGTGAAGGAGCTGCTGGGCATCACCATCATGGAGAGAA |
| | GCAGCTTCGAGAAGAACCCCATCGACTTCCTGGAGGCCAAGGGCTACAAGGAGGTGAAGAAGGACCTGATCATCAAGCTG |
| | CCCAAGTACAGCCTGTTCGAGCTGGAGAACGGCAGAAAGAGAATGCTGGCCAGCGCCGGCGAGCTGCAGAAGGGCAACG |
| | AGCTGGCCCTGCCCAGCAAGTACGTGAACTTCCTGTACCTGGCCAGCCACTACGAGAAGCTGAAGGGCAGCCCCGAGGAC |
| | AACGAGCAGAAGCAGCTGTTCGTGGAGCAGCACAAGCACTACCTGGACGAGATCATCGAGCAGATCAGCGAGTTCAGCAA |
| | GAGAGTGATCCTGGCCGACGCCAACCTGGACAAGGTGCTGAGCGCCTACAACAAGCACAGAGACAAGCCCATCAGAGAGC |
| | AGGCCGAGAACATCATCCACCTGTTCACCCTGACCAACCTGGGCGCCCCCGCCGCCTTCAAGTACTTCGACACCACCATCG |
| | ACAGAAAGAGATACACCAGCACCAAGGAGGTGCTGGACGCCACCCTGATCCACCAGAGCATCACCGGCCTGTACGAGACC |
| | AGAATCGACCTGAGCCAGCTGGGCGGCGACGGCGGCGGCAGCCCCAAGAAGAAGAGAAAGGTGTGA |
| 509 | GGGTCCCGCAGTCGGCGTCCAGCGGCTCTGCTTGTTCGTGTGTGTGTCGTTGCAGGCCTTATTCGGATCCGCCACCATGGAC |
| | AAGAAGTACAGCATCGGCCTGGACATCGGCACCAACAGCGTGGGCTGGGCCGTGATCACCGACGAGTACAAGGTGCCCAG |
| | CAAGAAGTTCAAGGTGCTGGGCAACACCGACAGACACAGCATCAAGAAGAACCTGATCGGCGCCCTGCTGTTCGACAGCG |
| | GCGAGACCGCCGAGGCCACCAGACTGAAGAGAACCGCCAGAAGAAGATACACCAGAAGAAAGAACAGAATCTGCTACCT |
| | GCAGGAGATCTTCAGCAACGAGATGGCCAAGGTGGACGACAGCTTCTTCCACAGACTGGAGGAGAGCTTCCTGGTGGAGG |
| | AGGACAAGAAGCACGAGAGACACCCCATCTTCGGCAACATCGTGGACGAGGTGGCCTACCACGAGAAGTACCCCACCATC |
| | TACCACCTGAGAAAGAAGCTGGTGGACAGCACCGACAAGGCCGACCTGAGACTGATCTACCTGGCCCTGGCCCACATGAT |
| | CAAGTTCAGAGGCCACTTCCTGATCGAGGGCGACCTGAACCCCGACAACAGCGACGTGGACAAGCTGTTCATCCAGCTGGT |
| | GCAGACCTACAACCAGCTGTTCGAGGAGAACCCCATCAACGCCAGCGGCGTGGACGCCAAGGCCATCCTGAGCGCCAGAC |
| | TGAGCAAGAGCAGAAGACTGGAGAACCTGATCGCCCAGCTGCCCGGCGAGAAGAAGAACGGCCTGTTCGGCAACCTGATC |
| | GCCCTGAGCCTGGGCCTGACCCCCAACTTCAAGAGCAACTTCGACCTGGCCGAGGACGCCAAGCTGCAGCTGAGCAAGGA |
| | CACCTACGACGACGACCTGGACAACCTGCTGGCCCAGATCGGCGACCAGTACGCCGACCTGTTCCTGGCCGCCAAGAACCT |
| | GAGCGACGCCATCCTGCTGAGCGACATCCTGAGAGTGAACACCGAGATCACCAAGGCCCCCCTGAGCGCCAGCATGATCA |
| | AGAGATACGACGAGCACCACCAGGACCTGACCCTGCTGAAGGCCCTGGTGAGACAGCAGCTGCCCGAGAAGTACAAGGA |
| | GATCTTCTTCGACCAGAGCAAGAACGGCTACGCCGGCTACATCGACGGCGGCGCCAGCCAGGAGGAGTTCTACAAGTTCAT |
| | CAAGCCCATCCTGGAGAAGATGGACGGCACCGAGGAGCTGCTGGTGAAGCTGAACAGAGAGGACCTGCTGAGAAAGCAG |
| | AGAACCTTCGACAACGGCAGCATCCCCCACCAGATCCACCTGGGCGAGCTGCACGCCATCCTGAGAAGACAGGAGGACTT |
| | CTACCCCTTCCTGAAGGACAACAGAGAGAAGATCGAGAAGATCCTGACCTTCAGAATCCCCTACTACGTGGGCCCCCTGGC |
| | CAGAGGCAACAGCAGATTCGCCTGGATGACCAGAAAGAGCGAGGAGACCATCACCCCCTGGAACTTCGAGGAGGTGGTGG |
| | ACAAGGGCGCCAGCGCCCAGAGCTTCATCGAGAGAATGACCAACTTCGACAAGAACCTGCCCAACGAGAAGGTGCTGCCC |
| | AAGCACAGCCTGCTGTACGAGTACTTCACCGTGTACAACGAGCTGACCAAGGTGAAGTACGTGACCGAGGGCATGAGAAA |
| | GCCCGCCTTCCTGAGCGGCGAGCAGAAGAAGGCCATCGTGGACCTGCTGTTCAAGACCAACAGAAAGGTGACCGTGAAGC |
| | AGCTGAAGGAGGACTACTTCAAGAAGATCGAGTGCTTCGACAGCGTGGAGATCAGCGGCGTGGAGGACAGATTCAACGCC |
| | AGCCTGGGCACCTACCACGACCTGCTGAAGATCATCAAGGACAAGGACTTCCTGGACAACGAGGAGAACGAGGACATCCT |
| | GGAGGACATCGTGCTGACCCTGACCCTGTTCGAGGACAGAGAGATGATCGAGGAGAGACTGAAGACCTACGCCCACCTGT |
| | TCGACGACAAGGTGATGAAGCAGCTGAAGAGAAGAAGATACACCGGCTGGGGCAGACTGAGCAGAAAGCTGATCAACGG |
| | CATCAGAGACAAGCAGAGCGGCAAGACCATCCTGGACTTCCTGAAGAGCGACGGCTTCGCCAACAGAAACTTCATGCAGC |
| | TGATCCACGACGACAGCCTGACCTTCAAGGAGGACATCCAGAAGGCCCAGGTGAGCGGCCAGGGCGACAGCCTGCACGAG |
| | CACATCGCCAACCTGGCCGGCAGCCCCGCCATCAAGAAGGGCATCCTGCAGACCGTGAAGGTGGTGGACGAGCTGGTGAA |
| | GGTGATGGGCAGACACAAGCCCGAGAACATCGTGATCGAGATGGCCAGAGAGAACCAGACCACCCAGAAGGGCCAGAAG |
| | AACAGCAGAGAGAGAATGAAGAGAATCGAGGAGGGCATCAAGGAGCTGGGCAGCCAGATCCTGAAGGAGCACCCCGTGG |
| | AGAACACCCAGCTGCAGAACGAGAAGCTGTACCTGTACTACCTGCAGAACGGCAGAGACATGTACGTGGACCAGGAGCTG |
| | GACATCAACAGACTGAGCGACTACGACGTGGACCACATCGTGCCCCAGAGCTTCCTGAAGGACGACAGCATCGACAACAA |
| | GGTGCTGACCAGAAGCGACAAGAACAGAGGCAAGAGCGACAACGTGCCCAGCGAGGAGGTGGTGAAGAAGATGAAGAAC |
| | TACTGGAGACAGCTGCTGAACGCCAAGCTGATCACCCAGAGAAAGTTCGACAACCTGACCAAGGCCGAGAGAGGCGGCCT |
| | GAGCGAGCTGGACAAGGCCGGCTTCATCAAGAGACAGCTGGTGGAGACCAGACAGATCACCAAGCACGTGGCCCAGATCC |
| | TGGACAGCAGAATGAACACCAAGTACGACGAGAACGACAAGCTGATCAGAGAGGTGAAGGTGATCACCCTGAAGAGCAA |
| | GCTGGTGAGCGACTTCAGAAAGGACTTCCAGTTCTACAAGGTGAGAGAGATCAACAACTACCACCACGCCCACGACGCCT |
| | ACCTGAACGCCGTGGTGGGCACCGCCCTGATCAAGAAGTACCCCAAGCTGGAGAGCGAGTTCGTGTACGGCGACTACAAG |
| | GTGTACGACGTGAGAAAGATGATCGCCAAGAGCGAGCAGGAGATCGGCAAGGCCACCGCCAAGTACTTCTTCTACAGCAA |
| | CATCATGAACTTCTTCAAGACCGAGATCACCCTGGCCAACGGCGAGATCAGAAAGAGACCCCTGATCGAGACCAACGGCG |
| | AGACCGGCGAGATCGTGTGGGACAAGGGCAGAGACTTCGCCACCGTGAGAAAGGTGCTGAGCATGCCCCAGGTGAACATC |
| | GTGAAGAAGACCGAGGTGCAGACCGGCGGCTTCAGCAAGGAGAGCATCCTGCCCAAGAGAAACAGCGACAAGCTGATCG |
| | CCAGAAAGAAGGACTGGGACCCCAAGAAGTACGGCGGCTTCGACAGCCCCACCGTGGCCTACAGCGTGCTGGTGGTGGCC |
| | AAGGTGGAGAAGGGCAAGAGCAAGAAGCTGAAGAGCGTGAAGGAGCTGCTGGGCATCACCATCATGGAGAGAAGCAGCT |
| | TCGAGAAGAACCCCATCGACTTCCTGGAGGCCAAGGGCTACAAGGAGGTGAAGAAGGACCTGATCATCAAGCTGCCCAAG |
| | TACAGCCTGTTCGAGCTGGAGAACGGCAGAAAGAGAATGCTGGCCAGCGCCGGCGAGCTGCAGAAGGGCAACGAGCTGG |
| | CCCTGCCCAGCAAGTACGTGAACTTCCTGTACCTGGCCAGCCACTACGAGAAGCTGAAGGGCAGCCCCGAGGACAACGAG |
| | CAGAAGCAGCTGTTCGTGGAGCAGCACAAGCACTACCTGGACGAGATCATCGAGCAGATCAGCGAGTTCAGCAAGAGAGT |
| | GATCCTGGCCGACGCCAACCTGGACAAGGTGCTGAGCGCCTACAACAAGCACAGAGACAAGCCCATCAGAGAGCAGGCCG |
| | AGAACATCATCCACCTGTTCACCCTGACCAACCTGGGCGCCCCCGCCGCCTTCAAGTACTTCGACACCACCATCGACAGAA |
| | AGAGATACACCAGCACCAAGGAGGTGCTGGACGCCACCCTGATCCACCAGAGCATCACCGGCCTGTACGAGACCAGAATC |
| | GACCTGAGCCAGCTGGGCGGCGACGGCGGCGGCAGCCCCAAGAAGAAGAGAAAGGTGTGACTAGCCATCACATTTAAAA |
| | GCATCTCAGCCTACCATGAGAATAAGAGAAAGAAAATGAAGATCAATAGCTTATTCATCTCTTTTTCTTTTTCGTTGGTGTA |
| | AAGCCAACACCCTGTCTAAAAAACATAAATTTCTTTAATCATTTTGCCTCTTTTCTCTGTGCTTCAATTAATAAAAAATGGA |
| | AAGAACCTCGAG |
| 510 | ATGGACAAGAAGTACTCTATCGGTTTGGACATCGGTACCAACTCTGTCGGTTGGGCCGTCATCACCGACGAATACAAGGTC |
| | CCATCTAAGAAGTTCAAGGTCTTGGGTAACACCGACAGACACTCTATCAAGAAGAACTTGATCGGTGCCTTGTTGTTCGAC |
| | TCTGGTGAAACCGCCGAAGCCACCAGATTGAAGAGAACCGCCAGAAGAAGATACACCAGAAGAAAGAACAGAATCTGCT |
| | ACTTGCAAGAAATCTTCTCTAACGAAATGGCCAAGGTCGACGACTCTTTCTTCCACAGATTGGAAGAATCTTTCTTGGTCGA |
| | AGAAGACAAGAAGCACGAAAGACACCCAATCTTCGGTAACATCGTCGACGAAGTCGCCTACCACGAAAAGTACCCAACCA |
| | TCTACCACTTGAGAAAGAAGTTGGTCGACTCTACCGACAAGGCCGACTTGAGATTGATCTACTTGGCCTTGGCCCACATGA |
| | TCAAGTTCAGAGGTCACTTCTTGATCGAAGGTGACTTGAACCCAGACAACTCTGACGTCGACAAGTTGTTCATCCAATTGGT |
| | CCAAACCTACAACCAATTGTTCGAAGAAAACCCAATCAACGCCTCTGGTGTCGACGCCAAGGCCATCTTGTCTGCCAGATT |
| | GTCTAAGAGCAGAAGATTGGAAAACTTGATCGCCCAATTGCCAGGTGAAAAGAAGAACGGTTTGTTCGGTAACTTGATCGC |
| | CTTGTCTTTGGGTTTGACCCCAAACTTCAAGTCTAACTTCGACTTGGCCGAAGACGCCAAGTTGCAATTGTCTAAGGACACC |
| | TACGACGACGACTTGGACAACTTGTTGGCCCAAATCGGTGACCAATACGCCGACTTGTTCTTGGCCGCCAAGAACTTGTCT |
| | GACGCCATCTTGTTGTCTGACATCTTGAGAGTCAACACCGAAATCACCAAGGCCCCATTGTCTGCCTCTATGATCAAGAGAT |
| | ACGACGAACACCACCAAGACTTGACCTTGTTGAAGGCCTTGGTCAGACAACAATTGCCAGAAAAGTACAAGGAAATCTTCT |
| | TCGACCAATCTAAGAACGGTTACGCCGGTTACATCGACGGTGGTGCCTCTCAAGAAGAATTCTACAAGTTCATCAAGCCAA |
| | TCTTGGAAAAGATGGACGGTACCGAAGAATTGTTGGTCAAGTTGAACAGAGAAGACTTGTTGAGAAAGCAAAGAACCTTC |
| | GACAACGGTTCTATCCCACACCAAATCCACTTGGGTGAATTGCACGCCATCTTGAGAAGACAAGAAGACTTCTACCCATTC |
| | TTGAAGGACAACAGAGAAAAGATCGAAAAGATCTTGACCTTCAGAATCCCATACTACGTCGGTCCATTGGCCAGAGGTAA |
| | CAGCAGATTCGCCTGGATGACCAGAAAGTCTGAAGAAACCATCACCCCATGGAACTTCGAAGAAGTCGTCGACAAGGGTG |
| | CCTCTGCCCAATCTTTCATCGAAAGAATGACCAACTTCGACAAGAACTTGCCAAACGAAAAGGTCTTGCCAAAGCACTCTT |
| | TGTTGTACGAATACTTCACCGTCTACAACGAATTGACCAAGGTCAAGTACGTCACCGAAGGTATGAGAAAGCCAGCCTTCT |
| | TGTCTGGTGAACAAAAGAAGGCCATCGTCGACTTGTTGTTCAAGACCAACAGAAAGGTCACCGTCAAGCAATTGAAGGAA |
| | GACTACTTCAAGAAGATCGAATGCTTCGACTCTGTCGAAATCTCTGGTGTCGAAGACAGATTCAACGCCTCTTTGGGTACCT |
| | ACCACGACTTGTTGAAGATCATCAAGGACAAGGACTTCTTGGACAACGAAGAAAACGAAGACATCTTGGAAGACATCGTC |
| | TTGACCTTGACCTTGTTCGAAGACAGAGAAATGATCGAAGAAAGATTGAAGACCTACGCCCACTTGTTCGACGACAAGGTC |
| | ATGAAGCAATTGAAGAGAAGAAGATACACCGGTTGGGGTAGATTGAGCAGAAAGTTGATCAACGGTATCAGAGACAAGC |
| | AATCTGGTAAGACCATCTTGGACTTCTTGAAGTCTGACGGTTTCGCCAACAGAAACTTCATGCAATTGATCCACGACGACTC |
| | TTTGACCTTCAAGGAAGACATCCAAAAGGCCCAAGTCTCTGGTCAAGGTGACTCTTTGCACGAACACATCGCCAACTTGGC |
| | CGGTTCTCCAGCCATCAAGAAGGGTATCTTGCAAACCGTCAAGGTCGTCGACGAATTGGTCAAGGTCATGGGTAGACACAA |
| | GCCAGAAAACATCGTCATCGAAATGGCCAGAGAAAACCAAACCACCCAAAAGGGTCAAAAGAACAGCAGAGAAAGAATG |
| | AAGAGAATCGAAGAAGGTATCAAGGAATTGGGTTCTCAAATCTTGAAGGAACACCCAGTCGAAAACACCCAATTGCAAAA |
| | CGAAAAGTTGTACTTGTACTACTTGCAAAACGGTAGAGACATGTACGTCGACCAAGAATTGGACATCAACAGATTGTCTGA |
| | CTACGACGTCGACCACATCGTCCCACAATCTTTCTTGAAGGACGACTCTATCGACAACAAGGTCTTGACCAGATCTGACAA |
| | GAACAGAGGTAAGTCTGACAACGTCCCATCTGAAGAAGTCGTCAAGAAGATGAAGAACTACTGGAGACAATTGTTGAACG |
| | CCAAGTTGATCACCCAAAGAAAGTTCGACAACTTGACCAAGGCCGAAAGAGGTGGTTTGTCTGAATTGGACAAGGCCGGT |
| | TTCATCAAGAGACAATTGGTCGAAACCAGACAAATCACCAAGCACGTCGCCCAAATCTTGGACAGCAGAATGAACACCAA |
| | GTACGACGAAAACGACAAGTTGATCAGAGAAGTCAAGGTCATCACCTTGAAGTCTAAGTTGGTCTCTGACTTCAGAAAGG |
| | ACTTCCAATTCTACAAGGTCAGAGAAATCAACAACTACCACCACGCCCACGACGCCTACTTGAACGCCGTCGTCGGTACCG |
| | CCTTGATCAAGAAGTACCCAAAGTTGGAATCTGAATTCGTCTACGGTGACTACAAGGTCTACGACGTCAGAAAGATGATCG |
| | CCAAGTCTGAACAAGAAATCGGTAAGGCCACCGCCAAGTACTTCTTCTACTCTAACATCATGAACTTCTTCAAGACCGAAA |
| | TCACCTTGGCCAACGGTGAAATCAGAAAGAGACCATTGATCGAAACCAACGGTGAAACCGGTGAAATCGTCTGGGACAAG |
| | GGTAGAGACTTCGCCACCGTCAGAAAGGTCTTGTCTATGCCACAAGTCAACATCGTCAAGAAGACCGAAGTCCAAACCGGT |
| | GGTTTCTCTAAGGAATCTATCTTGCCAAAGAGAAACTCTGACAAGTTGATCGCCAGAAAGAAGGACTGGGACCCAAAGAA |
| | GTACGGTGGTTTCGACTCTCCAACCGTCGCCTACTCTGTCTTGGTCGTCGCCAAGGTCGAAAAGGGTAAGTCTAAGAAGTT |
| | GAAGTCTGTCAAGGAATTGTTGGGTATCACCATCATGGAAAGATCTTCTTTCGAAAAGAACCCAATCGACTTCTTGGAAGC |
| | CAAGGGTTACAAGGAAGTCAAGAAGGACTTGATCATCAAGTTGCCAAAGTACTCTTTGTTCGAATTGGAAAACGGTAGAA |
| | AGAGAATGTTGGCCTCTGCCGGTGAATTGCAAAAGGGTAACGAATTGGCCTTGCCATCTAAGTACGTCAACTTCTTGTACTT |
| | GGCCTCTCACTACGAAAAGTTGAAGGGTTCTCCAGAAGACAACGAACAAAAGCAATTGTTCGTCGAACAACACAAGCACT |
| | ACTTGGACGAAATCATCGAACAAATCTCTGAATTCTCTAAGAGAGTCATCTTGGCCGACGCCAACTTGGACAAGGTCTTGT |
| | CTGCCTACAACAAGCACAGAGACAAGCCAATCAGAGAACAAGCCGAAAACATCATCCACTTGTTCACCTTGACCAACTTG |
| | GGTGCCCCAGCCGCCTTCAAGTACTTCGACACCACCATCGACAGAAAGAGATACACCTCTACCAAGGAAGTCTTGGACGCC |
| | ACCTTGATCCACCAATCTATCACCGGTTTGTACGAAACCAGAATCGACTTGTCTCAATTGGGTGGTGACGGTGGTGGTTCTC |
| | CAAAGAAGAAGAGAAAGGTCTAA |
| 511 | ATGGACAAGAAGTACTCCATCGGCCTGGACATCGGCACCAACTCCGTGGGCTGGGCCGTGATCACCGACGAGTACAAGGT |
| | GCCCTCCAAGAAGTTCAAGGTGCTGGGCAACACCGACCGGCACTCCATCAAGAAGAACCTGATCGGCGCCCTGCTGTTCGA |
| | CTCCGGCGAGACCGCCGAGGCCACCCGGCTGAAGCGGACCGCCCGGCGGCGGTACACCCGGCGGAAGAACCGGATCTGCT |
| | ACCTGCAGGAGATCTTCTCCAACGAGATGGCCAAGGTGGACGACTCCTTCTTCCACCGGCTGGAGGAGTCCTTCCTGGTGG |
| | AGGAGGACAAGAAGCACGAGCGGCACCCCATCTTCGGCAACATCGTGGACGAGGTGGCCTACCACGAGAAGTACCCCACC |
| | ATCTACCACCTGCGGAAGAAGCTGGTGGACTCCACCGACAAGGCCGACCTGCGGCTGATCTACCTGGCCCTGGCCCACATG |
| | ATCAAGTTCCGGGGCCACTTCCTGATCGAGGGCGACCTGAACCCCGACAACTCCGACGTGGACAAGCTGTTCATCCAGCTG |
| | GTGCAGACCTACAACCAGCTGTTCGAGGAGAACCCCATCAACGCCTCCGGCGTGGACGCCAAGGCCATCCTGTCCGCCCGG |
| | CTGTCCAAGTCCCGGCGGCTGGAGAACCTGATCGCCCAGCTGCCCGGCGAGAAGAAGAACGGCCTGTTCGGCAACCTGAT |
| | CGCCCTGTCCCTGGGCCTGACCCCCAACTTCAAGTCCAACTTCGACCTGGCCGAGGACGCCAAGCTGCAGCTGTCCAAGGA |
| | CACCTACGACGACGACCTGGACAACCTGCTGGCCCAGATCGGCGACCAGTACGCCGACCTGTTCCTGGCCGCCAAGAACCT |
| | GTCCGACGCCATCCTGCTGTCCGACATCCTGCGGGTGAACACCGAGATCACCAAGGCCCCCCTGTCCGCCTCCATGATCAA |
| | GCGGTACGACGAGCACCACCAGGACCTGACCCTGCTGAAGGCCCTGGTGCGGCAGCAGCTGCCCGAGAAGTACAAGGAGA |
| | TCTTCTTCGACCAGTCCAAGAACGGCTACGCCGGCTACATCGACGGCGGCGCCTCCCAGGAGGAGTTCTACAAGTTCATCA |
| | AGCCCATCCTGGAGAAGATGGACGGCACCGAGGAGCTGCTGGTGAAGCTGAACCGGGAGGACCTGCTGCGGAAGCAGCG |
| | GACCTTCGACAACGGCTCCATCCCCCACCAGATCCACCTGGGCGAGCTGCACGCCATCCTGCGGCGGCAGGAGGACTTCTA |
| | CCCCTTCCTGAAGGACAACCGGGAGAAGATCGAGAAGATCCTGACCTTCCGGATCCCCTACTACGTGGGCCCCCTGGCCCG |
| | GGGCAACTCCCGGTTCGCCTGGATGACCCGGAAGTCCGAGGAGACCATCACCCCCTGGAACTTCGAGGAGGTGGTGGACA |
| | AGGGCGCCTCCGCCCAGTCCTTCATCGAGCGGATGACCAACTTCGACAAGAACCTGCCCAACGAGAAGGTGCTGCCCAAG |
| | CACTCCCTGCTGTACGAGTACTTCACCGTGTACAACGAGCTGACCAAGGTGAAGTACGTGACCGAGGGCATGCGGAAGCCC |
| | GCCTTCCTGTCCGGCGAGCAGAAGAAGGCCATCGTGGACCTGCTGTTCAAGACCAACCGGAAGGTGACCGTGAAGCAGCT |
| | GAAGGAGGACTACTTCAAGAAGATCGAGTGCTTCGACTCCGTGGAGATCTCCGGCGTGGAGGACCGGTTCAACGCCTCCCT |
| | GGGCACCTACCACGACCTGCTGAAGATCATCAAGGACAAGGACTTCCTGGACAACGAGGAGAACGAGGACATCCTGGAGG |
| | ACATCGTGCTGACCCTGACCCTGTTCGAGGACCGGGAGATGATCGAGGAGCGGCTGAAGACCTACGCCCACCTGTTCGACG |
| | ACAAGGTGATGAAGCAGCTGAAGCGGCGGCGGTACACCGGCTGGGGCCGGCTGTCCCGGAAGCTGATCAACGGCATCCGG |
| | GACAAGCAGTCCGGCAAGACCATCCTGGACTTCCTGAAGTCCGACGGCTTCGCCAACCGGAACTTCATGCAGCTGATCCAC |
| | GACGACTCCCTGACCTTCAAGGAGGACATCCAGAAGGCCCAGGTGTCCGGCCAGGGCGACTCCCTGCACGAGCACATCGC |
| | CAACCTGGCCGGCTCCCCCGCCATCAAGAAGGGCATCCTGCAGACCGTGAAGGTGGTGGACGAGCTGGTGAAGGTGATGG |
| | GCCGGCACAAGCCCGAGAACATCGTGATCGAGATGGCCCGGGAGAACCAGACCACCCAGAAGGGCCAGAAGAACTCCCG |
| | GGAGCGGATGAAGCGGATCGAGGAGGGCATCAAGGAGCTGGGCTCCCAGATCCTGAAGGAGCACCCCGTGGAGAACACC |
| | CAGCTGCAGAACGAGAAGCTGTACCTGTACTACCTGCAGAACGGCCGGGACATGTACGTGGACCAGGAGCTGGACATCAA |
| | CCGGCTGTCCGACTACGACGTGGACCACATCGTGCCCCAGTCCTTCCTGAAGGACGACTCCATCGACAACAAGGTGCTGAC |
| | CCGGTCCGACAAGAACCGGGGCAAGTCCGACAACGTGCCCTCCGAGGAGGTGGTGAAGAAGATGAAGAACTACTGGCGGC |
| | AGCTGCTGAACGCCAAGCTGATCACCCAGCGGAAGTTCGACAACCTGACCAAGGCCGAGCGGGGCGGCCTGTCCGAGCTG |
| | GACAAGGCCGGCTTCATCAAGCGGCAGCTGGTGGAGACCCGGCAGATCACCAAGCACGTGGCCCAGATCCTGGACTCCCG |
| | GATGAACACCAAGTACGACGAGAACGACAAGCTGATCCGGGAGGTGAAGGTGATCACCCTGAAGTCCAAGCTGGTGTCCG |
| | ACTTCCGGAAGGACTTCCAGTTCTACAAGGTGCGGGAGATCAACAACTACCACCACGCCCACGACGCCTACCTGAACGCCG |
| | TGGTGGGCACCGCCCTGATCAAGAAGTACCCCAAGCTGGAGTCCGAGTTCGTGTACGGCGACTACAAGGTGTACGACGTGC |
| | GGAAGATGATCGCCAAGTCCGAGCAGGAGATCGGCAAGGCCACCGCCAAGTACTTCTTCTACTCCAACATCATGAACTTCT |
| | TCAAGACCGAGATCACCCTGGCCAACGGCGAGATCCGGAAGCGGCCCCTGATCGAGACCAACGGCGAGACCGGCGAGATC |
| | GTGTGGGACAAGGGCCGGGACTTCGCCACCGTGCGGAAGGTGCTGTCCATGCCCCAGGTGAACATCGTGAAGAAGACCGA |
| | GGTGCAGACCGGCGGCTTCTCCAAGGAGTCCATCCTGCCCAAGCGGAACTCCGACAAGCTGATCGCCCGGAAGAAGGACT |
| | GGGACCCCAAGAAGTACGGCGGCTTCGACTCCCCCACCGTGGCCTACTCCGTGCTGGTGGTGGCCAAGGTGGAGAAGGGC |
| | AAGTCCAAGAAGCTGAAGTCCGTGAAGGAGCTGCTGGGCATCACCATCATGGAGCGGTCCTCCTTCGAGAAGAACCCCAT |
| | CGACTTCCTGGAGGCCAAGGGCTACAAGGAGGTGAAGAAGGACCTGATCATCAAGCTGCCCAAGTACTCCCTGTTCGAGCT |
| | GGAGAACGGCCGGAAGCGGATGCTGGCCTCCGCCGGCGAGCTGCAGAAGGGCAACGAGCTGGCCCTGCCCTCCAAGTACG |
| | TGAACTTCCTGTACCTGGCCTCCCACTACGAGAAGCTGAAGGGCTCCCCCGAGGACAACGAGCAGAAGCAGCTGTTCGTGG |
| | AGCAGCACAAGCACTACCTGGACGAGATCATCGAGCAGATCTCCGAGTTCTCCAAGCGGGTGATCCTGGCCGACGCCAAC |
| | CTGGACAAGGTGCTGTCCGCCTACAACAAGCACCGGGACAAGCCCATCCGGGAGCAGGCCGAGAACATCATCCACCTGTT |
| | CACCCTGACCAACCTGGGCGCCCCCGCCGCCTTCAAGTACTTCGACACCACCATCGACCGGAAGCGGTACACCTCCACCAA |
| | GGAGGTGCTGGACGCCACCCTGATCCACCAGTCCATCACCGGCCTGTACGAGACCCGGATCGACCTGTCCCAGCTGGGCGG |
| | CGACGGCGGCGGCTCCCCCAAGAAGAAGCGGAAGGTGTGA |
| 512 | ATGGACAAGAAGTACAGCATCGGCCTGGACATCGGCACCAACAGCGTGGGCTGGGCCGTGATCACCGACGAGTACAAGGT |
| | GCCCAGCAAGAAGTTCAAGGTGCTGGGCAACACCGACCGGCACAGCATCAAGAAGAACCTGATCGGCGCCCTGCTGTTCG |
| | ACAGCGGCGAGACCGCCGAGGCCACCCGGCTGAAGCGGACCGCCCGGCGGCGGTACACCCGGCGGAAGAACCGGATCTG |
| | CTACCTGCAGGAGATCTTCAGCAACGAGATGGCCAAGGTGGACGACAGCTTCTTCCACCGGCTGGAGGAGAGCTTCCTGGT |
| | GGAGGAGGACAAGAAGCACGAGCGGCACCCCATCTTCGGCAACATCGTGGACGAGGTGGCCTACCACGAGAAGTACCCCA |
| | CCATCTACCACCTGCGGAAGAAGCTGGTGGACAGCACCGACAAGGCCGACCTGCGGCTGATCTACCTGGCCCTGGCCCAC |
| | ATGATCAAGTTCCGGGGCCACTTCCTGATCGAGGGCGACCTGAACCCCGACAACAGCGACGTGGACAAGCTGTTCATCCAG |
| | CTGGTGCAGACCTACAACCAGCTGTTCGAGGAGAACCCCATCAACGCCAGCGGCGTGGACGCCAAGGCCATCCTGAGCGC |
| | CCGGCTGAGCAAGAGCCGGCGGCTGGAGAACCTGATCGCCCAGCTGCCCGGCGAGAAGAAGAACGGCCTGTTCGGCAACC |
| | TGATCGCCCTGAGCCTGGGCCTGACCCCCAACTTCAAGAGCAACTTCGACCTGGCCGAGGACGCCAAGCTGCAGCTGAGCA |
| | AGGACACCTACGACGACGACCTGGACAACCTGCTGGCCCAGATCGGCGACCAGTACGCCGACCTGTTCCTGGCCGCCAAG |
| | AACCTGAGCGACGCCATCCTGCTGAGCGACATCCTGCGGGTGAACACCGAGATCACCAAGGCCCCCCTGAGCGCCAGCAT |
| | GATCAAGCGGTACGACGAGCACCACCAGGACCTGACCCTGCTGAAGGCCCTGGTGCGGCAGCAGCTGCCCGAGAAGTACA |
| | AGGAGATCTTCTTCGACCAGAGCAAGAACGGCTACGCCGGCTACATCGACGGCGGCGCCAGCCAGGAGGAGTTCTACAAG |
| | TTCATCAAGCCCATCCTGGAGAAGATGGACGGCACCGAGGAGCTGCTGGTGAAGCTGAACCGGGAGGACCTGCTGCGGAA |
| | GCAGCGGACCTTCGACAACGGCAGCATCCCCCACCAGATCCACCTGGGCGAGCTGCACGCCATCCTGCGGCGGCAGGAGG |
| | ACTTCTACCCCTTCCTGAAGGACAACCGGGAGAAGATCGAGAAGATCCTGACCTTCCGGATCCCCTACTACGTGGGCCCCC |
| | TGGCCCGGGGCAACAGCCGGTTCGCCTGGATGACCCGGAAGAGCGAGGAGACCATCACCCCCTGGAACTTCGAGGAGGTG |
| | GTGGACAAGGGCGCCAGCGCCCAGAGCTTCATCGAGCGGATGACCAACTTCGACAAGAACCTGCCCAACGAGAAGGTGCT |
| | GCCCAAGCACAGCCTGCTGTACGAGTACTTCACCGTGTACAACGAGCTGACCAAGGTGAAGTACGTGACCGAGGGCATGC |
| | GGAAGCCCGCCTTCCTGAGCGGCGAGCAGAAGAAGGCCATCGTGGACCTGCTGTTCAAGACCAACCGGAAGGTGACCGTG |
| | AAGCAGCTGAAGGAGGACTACTTCAAGAAGATCGAGTGCTTCGACAGCGTGGAGATCAGCGGCGTGGAGGACCGGTTCAA |
| | CGCCAGCCTGGGCACCTACCACGACCTGCTGAAGATCATCAAGGACAAGGACTTCCTGGACAACGAGGAGAACGAGGACA |
| | TCCTGGAGGACATCGTGCTGACCCTGACCCTGTTCGAGGACCGGGAGATGATCGAGGAGCGGCTGAAGACCTACGCCCAC |
| | CTGTTCGACGACAAGGTGATGAAGCAGCTGAAGCGGCGGCGGTACACCGGCTGGGGCCGGCTGAGCCGGAAGCTGATCAA |
| | CGGCATCCGGGACAAGCAGAGCGGCAAGACCATCCTGGACTTCCTGAAGAGCGACGGCTTCGCCAACCGGAACTTCATGC |
| | AGCTGATCCACGACGACAGCCTGACCTTCAAGGAGGACATCCAGAAGGCCCAGGTGAGCGGCCAGGGCGACAGCCTGCAC |
| | GAGCACATCGCCAACCTGGCCGGCAGCCCCGCCATCAAGAAGGGCATCCTGCAGACCGTGAAGGTGGTGGACGAGCTGGT |
| | GAAGGTGATGGGCCGGCACAAGCCCGAGAACATCGTGATCGAGATGGCCCGGGAGAACCAGACCACCCAGAAGGGCCAG |
| | AAGAACAGCCGGGAGCGGATGAAGCGGATCGAGGAGGGCATCAAGGAGCTGGGCAGCCAGATCCTGAAGGAGCACCCCG |
| | TGGAGAACACCCAGCTGCAGAACGAGAAGCTGTACCTGTACTACCTGCAGAACGGCCGGGACATGTACGTGGACCAGGAG |
| | CTGGACATCAACCGGCTGAGCGACTACGACGTGGACCACATCGTGCCCCAGAGCTTCCTGAAGGACGACAGCATCGACAA |
| | CAAGGTGCTGACCCGGAGCGACAAGAACCGGGGCAAGAGCGACAACGTGCCCAGCGAGGAGGTGGTGAAGAAGATGAAG |
| | AACTACTGGCGGCAGCTGCTGAACGCCAAGCTGATCACCCAGCGGAAGTTCGACAACCTGACCAAGGCCGAGCGGGGCGG |
| | CCTGAGCGAGCTGGACAAGGCCGGCTTCATCAAGCGGCAGCTGGTGGAGACCCGGCAGATCACCAAGCACGTGGCCCAGA |
| | TCCTGGACAGCCGGATGAACACCAAGTACGACGAGAACGACAAGCTGATCCGGGAGGTGAAGGTGATCACCCTGAAGAGC |
| | AAGCTGGTGAGCGACTTCCGGAAGGACTTCCAGTTCTACAAGGTGCGGGAGATCAACAACTACCACCACGCCCACGACGC |
| | CTACCTGAACGCCGTGGTGGGCACCGCCCTGATCAAGAAGTACCCCAAGCTGGAGAGCGAGTTCGTGTACGGCGACTACA |
| | AGGTGTACGACGTGCGGAAGATGATCGCCAAGAGCGAGCAGGAGATCGGCAAGGCCACCGCCAAGTACTTCTTCTACAGC |
| | AACATCATGAACTTCTTCAAGACCGAGATCACCCTGGCCAACGGCGAGATCCGGAAGCGGCCCCTGATCGAGACCAACGG |
| | CGAGACCGGCGAGATCGTGTGGGACAAGGGCCGGGACTTCGCCACCGTGCGGAAGGTGCTGAGCATGCCCCAGGTGAACA |
| | TCGTGAAGAAGACCGAGGTGCAGACCGGCGGCTTCAGCAAGGAGAGCATCCTGCCCAAGCGGAACAGCGACAAGCTGATC |
| | GCCCGGAAGAAGGACTGGGACCCCAAGAAGTACGGCGGCTTCGACAGCCCCACCGTGGCCTACAGCGTGCTGGTGGTGGC |
| | CAAGGTGGAGAAGGGCAAGAGCAAGAAGCTGAAGAGCGTGAAGGAGCTGCTGGGCATCACCATCATGGAGCGGAGCAGC |
| | TTCGAGAAGAACCCCATCGACTTCCTGGAGGCCAAGGGCTACAAGGAGGTGAAGAAGGACCTGATCATCAAGCTGCCCAA |
| | GTACAGCCTGTTCGAGCTGGAGAACGGCCGGAAGCGGATGCTGGCCAGCGCCGGCGAGCTGCAGAAGGGCAACGAGCTGG |
| | CCCTGCCCAGCAAGTACGTGAACTTCCTGTACCTGGCCAGCCACTACGAGAAGCTGAAGGGCAGCCCCGAGGACAACGAG |
| | CAGAAGCAGCTGTTCGTGGAGCAGCACAAGCACTACCTGGACGAGATCATCGAGCAGATCAGCGAGTTCAGCAAGCGGGT |
| | GATCCTGGCCGACGCCAACCTGGACAAGGTGCTGAGCGCCTACAACAAGCACCGGGACAAGCCCATCCGGGAGCAGGCCG |
| | AGAACATCATCCACCTGTTCACCCTGACCAACCTGGGCGCCCCCGCCGCCTTCAAGTACTTCGACACCACCATCGACCGGA |
| | AGCGGTACACCAGCACCAAGGAGGTGCTGGACGCCACCCTGATCCACCAGAGCATCACCGGCCTGTACGAGACCCGGATC |
| | GACCTGAGCCAGCTGGGCGGCGACGGCGGCGGCAGCCCCAAGAAGAAGCGGAAGGTGTGA |
| 513 | ATGGACAAGAAGTACTCCATCGGCCTGGACATCGGCACCAACTCCGTGGGCTGGGCCGTGATCACCGACGAGTACAAGGT |
| | GCCCTCCAAGAAGTTCAAGGTGCTGGGCAACACCGACCGGCACTCCATCAAGAAGAACCTGATCGGCGCCCTGCTGTTCGA |
| | CTCCGGCGAGACCGCCGAGGCCACCCGGCTGAAGCGGACCGCCCGGCGGCGGTACACCCGGCGGAAGAACCGGATCTGCT |
| | ACCTGCAGGAGATCTTCTCCAACGAGATGGCCAAGGTGGACGACTCCTTCTTCCACCGGCTGGAGGAGTCCTTCCTGGTGG |
| | AGGAGGACAAGAAGCACGAGCGGCACCCCATCTTCGGCAACATCGTGGACGAGGTGGCCTACCACGAGAAGTACCCCACC |
| | ATCTACCACCTGCGGAAGAAGCTGGTGGACTCCACCGACAAGGCCGACCTGCGGCTGATCTACCTGGCCCTGGCCCACATG |
| | ATCAAGTTCCGGGGCCACTTCCTGATCGAGGGCGACCTGAACCCCGACAACTCCGACGTGGACAAGCTGTTCATCCAGCTG |
| | GTGCAGACCTACAACCAGCTGTTCGAGGAGAACCCCATCAACGCCTCCGGCGTGGACGCCAAGGCCATCCTGTCCGCCCGG |
| | CTGTCCAAGTCCCGGCGGCTGGAGAACCTGATCGCCCAGCTGCCCGGCGAGAAGAAGAACGGCCTGTTCGGCAACCTGAT |
| | CGCCCTGTCCCTGGGCCTGACCCCCAACTTCAAGTCCAACTTCGACCTGGCCGAGGACGCCAAGCTGCAGCTGTCCAAGGA |
| | CACCTACGACGACGACCTGGACAACCTGCTGGCCCAGATCGGCGACCAGTACGCCGACCTGTTCCTGGCCGCCAAGAACCT |
| | GTCCGACGCCATCCTGCTGTCCGACATCCTGCGGGTGAACACCGAGATCACCAAGGCCCCCCTGTCCGCCTCCATGATCAA |
| | GCGGTACGACGAGCACCACCAGGACCTGACCCTGCTGAAGGCCCTGGTGCGGCAGCAGCTGCCCGAGAAGTACAAGGAGA |
| | TCTTCTTCGACCAGTCCAAGAACGGCTACGCCGGCTACATCGACGGCGGCGCCTCCCAGGAGGAGTTCTACAAGTTCATCA |
| | AGCCCATCCTGGAGAAGATGGACGGCACCGAGGAGCTGCTGGTGAAGCTGAACCGGGAGGACCTGCTGCGGAAGCAGCG |
| | GACCTTCGACAACGGCTCCATCCCCCACCAGATCCACCTGGGCGAGCTGCACGCCATCCTGCGGCGGCAGGAGGACTTCTA |
| | CCCCTTCCTGAAGGACAACCGGGAGAAGATCGAGAAGATCCTGACCTTCCGGATCCCCTACTACGTGGGCCCCCTGGCCCG |
| | GGGCAACTCCCGGTTCGCCTGGATGACCCGGAAGTCCGAGGAGACCATCACCCCCTGGAACTTCGAGGAGGTGGTGGACA |
| | AGGGCGCCTCCGCCCAGTCCTTCATCGAGCGGATGACCAACTTCGACAAGAACCTGCCCAACGAGAAGGTGCTGCCCAAG |
| | CACTCCCTGCTGTACGAGTACTTCACCGTGTACAACGAGCTGACCAAGGTGAAGTACGTGACCGAGGGCATGCGGAAGCCC |
| | GCCTTCCTGTCCGGCGAGCAGAAGAAGGCCATCGTGGACCTGCTGTTCAAGACCAACCGGAAGGTGACCGTGAAGCAGCT |
| | GAAGGAGGACTACTTCAAGAAGATCGAGTGCTTCGACTCCGTGGAGATCTCCGGCGTGGAGGACCGGTTCAACGCCTCCCT |
| | GGGCACCTACCACGACCTGCTGAAGATCATCAAGGACAAGGACTTCCTGGACAACGAGGAGAACGAGGACATCCTGGAGG |
| | ACATCGTGCTGACCCTGACCCTGTTCGAGGACCGGGAGATGATCGAGGAGCGGCTGAAGACCTACGCCCACCTGTTCGACG |
| | ACAAGGTGATGAAGCAGCTGAAGCGGCGGCGGTACACCGGCTGGGGCCGGCTGTCCCGGAAGCTGATCAACGGCATCCGG |
| | GACAAGCAGTCCGGCAAGACCATCCTGGACTTCCTGAAGTCCGACGGCTTCGCCAACCGGAACTTCATGCAGCTGATCCAC |
| | GACGACTCCCTGACCTTCAAGGAGGACATCCAGAAGGCCCAGGTGTCCGGCCAGGGCGACTCCCTGCACGAGCACATCGC |
| | CAACCTGGCCGGCTCCCCCGCCATCAAGAAGGGCATCCTGCAGACCGTGAAGGTGGTGGACGAGCTGGTGAAGGTGATGG |
| | GCCGGCACAAGCCCGAGAACATCGTGATCGAGATGGCCCGGGAGAACCAGACCACCCAGAAGGGCCAGAAGAACTCCCG |
| | GGAGCGGATGAAGCGGATCGAGGAGGGCATCAAGGAGCTGGGCTCCCAGATCCTGAAGGAGCACCCCGTGGAGAACACC |
| | CAGCTGCAGAACGAGAAGCTGTACCTGTACTACCTGCAGAACGGCCGGGACATGTACGTGGACCAGGAGCTGGACATCAA |
| | CCGGCTGTCCGACTACGACGTGGACCACATCGTGCCCCAGTCCTTCCTGAAGGACGACTCCATCGACAACAAGGTGCTGAC |
| | CCGGTCCGACAAGAACCGGGGCAAGTCCGACAACGTGCCCTCCGAGGAGGTGGTGAAGAAGATGAAGAACTACTGGCGGC |
| | AGCTGCTGAACGCCAAGCTGATCACCCAGCGGAAGTTCGACAACCTGACCAAGGCCGAGCGGGGCGGCCTGTCCGAGCTG |
| | GACAAGGCCGGCTTCATCAAGCGGCAGCTGGTGGAGACCCGGCAGATCACCAAGCACGTGGCCCAGATCCTGGACTCCCG |
| | GATGAACACCAAGTACGACGAGAACGACAAGCTGATCCGGGAGGTGAAGGTGATCACCCTGAAGTCCAAGCTGGTGTCCG |
| | ACTTCCGGAAGGACTTCCAGTTCTACAAGGTGCGGGAGATCAACAACTACCACCACGCCCACGACGCCTACCTGAACGCCG |
| | TGGTGGGCACCGCCCTGATCAAGAAGTACCCCAAGCTGGAGTCCGAGTTCGTGTACGGCGACTACAAGGTGTACGACGTGC |
| | GGAAGATGATCGCCAAGTCCGAGCAGGAGATCGGCAAGGCCACCGCCAAGTACTTCTTCTACTCCAACATCATGAACTTCT |
| | TCAAGACCGAGATCACCCTGGCCAACGGCGAGATCCGGAAGCGGCCCCTGATCGAGACCAACGGCGAGACCGGCGAGATC |
| | GTGTGGGACAAGGGCCGGGACTTCGCCACCGTGCGGAAGGTGCTGTCCATGCCCCAGGTGAACATCGTGAAGAAGACCGA |
| | GGTGCAGACCGGCGGCTTCTCCAAGGAGTCCATCCTGCCCAAGCGGAACTCCGACAAGCTGATCGCCCGGAAGAAGGACT |
| | GGGACCCCAAGAAGTACGGCGGCTTCGACTCCCCCACCGTGGCCTACTCCGTGCTGGTGGTGGCCAAGGTGGAGAAGGGC |
| | AAGTCCAAGAAGCTGAAGTCCGTGAAGGAGCTGCTGGGCATCACCATCATGGAGCGGTCCTCCTTCGAGAAGAACCCCAT |
| | CGACTTCCTGGAGGCCAAGGGCTACAAGGAGGTGAAGAAGGACCTGATCATCAAGCTGCCCAAGTACTCCCTGTTCGAGCT |
| | GGAGAACGGCCGGAAGCGGATGCTGGCCTCCGCCGGCGAGCTGCAGAAGGGCAACGAGCTGGCCCTGCCCTCCAAGTACG |
| | TGAACTTCCTGTACCTGGCCTCCCACTACGAGAAGCTGAAGGGCTCCCCCGAGGACAACGAGCAGAAGCAGCTGTTCGTGG |
| | AGCAGCACAAGCACTACCTGGACGAGATCATCGAGCAGATCTCCGAGTTCTCCAAGCGGGTGATCCTGGCCGACGCCAAC |
| | CTGGACAAGGTGCTGTCCGCCTACAACAAGCACCGGGACAAGCCCATCCGGGAGCAGGCCGAGAACATCATCCACCTGTT |
| | CACCCTGACCAACCTGGGCGCCCCCGCCGCCTTCAAGTACTTCGACACCACCATCGACCGGAAGCGGTACACCTCCACCAA |
| | GGAGGTGCTGGACGCCACCCTGATCCACCAGTCCATCACCGGCCTGTACGAGACCCGGATCGACCTGTCCCAGCTGGGCGG |
| | CGACGGCTCCGGCTCCCCCAAGAAGAAGCGGAAGGTGGACGGCTCCCCCAAGAAGAAGCGGAAGGTGGACTCCGGCTGA |
| 514 | ATGGACAAGAAGTACAGCATCGGCCTGGACATCGGCACCAACAGCGTGGGCTGGGCCGTGATCACCGACGAGTACAAGGT |
| | GCCCAGCAAGAAGTTCAAGGTGCTGGGCAACACCGACCGGCACAGCATCAAGAAGAACCTGATCGGCGCCCTGCTGTTCG |
| | ACAGCGGCGAGACCGCCGAGGCCACCCGGCTGAAGCGGACCGCCCGGCGGCGGTACACCCGGCGGAAGAACCGGATCTG |
| | CTACCTGCAGGAGATCTTCAGCAACGAGATGGCCAAGGTGGACGACAGCTTCTTCCACCGGCTGGAGGAGAGCTTCCTGGT |
| | GGAGGAGGACAAGAAGCACGAGCGGCACCCCATCTTCGGCAACATCGTGGACGAGGTGGCCTACCACGAGAAGTACCCCA |
| | CCATCTACCACCTGCGGAAGAAGCTGGTGGACAGCACCGACAAGGCCGACCTGCGGCTGATCTACCTGGCCCTGGCCCAC |
| | ATGATCAAGTTCCGGGGCCACTTCCTGATCGAGGGCGACCTGAACCCCGACAACAGCGACGTGGACAAGCTGTTCATCCAG |
| | CTGGTGCAGACCTACAACCAGCTGTTCGAGGAGAACCCCATCAACGCCAGCGGCGTGGACGCCAAGGCCATCCTGAGCGC |
| | CCGGCTGAGCAAGAGCCGGCGGCTGGAGAACCTGATCGCCCAGCTGCCCGGCGAGAAGAAGAACGGCCTGTTCGGCAACC |
| | TGATCGCCCTGAGCCTGGGCCTGACCCCCAACTTCAAGAGCAACTTCGACCTGGCCGAGGACGCCAAGCTGCAGCTGAGCA |
| | AGGACACCTACGACGACGACCTGGACAACCTGCTGGCCCAGATCGGCGACCAGTACGCCGACCTGTTCCTGGCCGCCAAG |
| | AACCTGAGCGACGCCATCCTGCTGAGCGACATCCTGCGGGTGAACACCGAGATCACCAAGGCCCCCCTGAGCGCCAGCAT |
| | GATCAAGCGGTACGACGAGCACCACCAGGACCTGACCCTGCTGAAGGCCCTGGTGCGGCAGCAGCTGCCCGAGAAGTACA |
| | AGGAGATCTTCTTCGACCAGAGCAAGAACGGCTACGCCGGCTACATCGACGGCGGCGCCAGCCAGGAGGAGTTCTACAAG |
| | TTCATCAAGCCCATCCTGGAGAAGATGGACGGCACCGAGGAGCTGCTGGTGAAGCTGAACCGGGAGGACCTGCTGCGGAA |
| | GCAGCGGACCTTCGACAACGGCAGCATCCCCCACCAGATCCACCTGGGCGAGCTGCACGCCATCCTGCGGCGGCAGGAGG |
| | ACTTCTACCCCTTCCTGAAGGACAACCGGGAGAAGATCGAGAAGATCCTGACCTTCCGGATCCCCTACTACGTGGGCCCCC |
| | TGGCCCGGGGCAACAGCCGGTTCGCCTGGATGACCCGGAAGAGCGAGGAGACCATCACCCCCTGGAACTTCGAGGAGGTG |
| | GTGGACAAGGGCGCCAGCGCCCAGAGCTTCATCGAGCGGATGACCAACTTCGACAAGAACCTGCCCAACGAGAAGGTGCT |
| | GCCCAAGCACAGCCTGCTGTACGAGTACTTCACCGTGTACAACGAGCTGACCAAGGTGAAGTACGTGACCGAGGGCATGC |
| | GGAAGCCCGCCTTCCTGAGCGGCGAGCAGAAGAAGGCCATCGTGGACCTGCTGTTCAAGACCAACCGGAAGGTGACCGTG |
| | AAGCAGCTGAAGGAGGACTACTTCAAGAAGATCGAGTGCTTCGACAGCGTGGAGATCAGCGGCGTGGAGGACCGGTTCAA |
| | CGCCAGCCTGGGCACCTACCACGACCTGCTGAAGATCATCAAGGACAAGGACTTCCTGGACAACGAGGAGAACGAGGACA |
| | TCCTGGAGGACATCGTGCTGACCCTGACCCTGTTCGAGGACCGGGAGATGATCGAGGAGCGGCTGAAGACCTACGCCCAC |
| | CTGTTCGACGACAAGGTGATGAAGCAGCTGAAGCGGCGGCGGTACACCGGCTGGGGCCGGCTGAGCCGGAAGCTGATCAA |
| | CGGCATCCGGGACAAGCAGAGCGGCAAGACCATCCTGGACTTCCTGAAGAGCGACGGCTTCGCCAACCGGAACTTCATGC |
| | AGCTGATCCACGACGACAGCCTGACCTTCAAGGAGGACATCCAGAAGGCCCAGGTGAGCGGCCAGGGCGACAGCCTGCAC |
| | GAGCACATCGCCAACCTGGCCGGCAGCCCCGCCATCAAGAAGGGCATCCTGCAGACCGTGAAGGTGGTGGACGAGCTGGT |
| | GAAGGTGATGGGCCGGCACAAGCCCGAGAACATCGTGATCGAGATGGCCCGGGAGAACCAGACCACCCAGAAGGGCCAG |
| | AAGAACAGCCGGGAGCGGATGAAGCGGATCGAGGAGGGCATCAAGGAGCTGGGCAGCCAGATCCTGAAGGAGCACCCCG |
| | TGGAGAACACCCAGCTGCAGAACGAGAAGCTGTACCTGTACTACCTGCAGAACGGCCGGGACATGTACGTGGACCAGGAG |
| | CTGGACATCAACCGGCTGAGCGACTACGACGTGGACCACATCGTGCCCCAGAGCTTCCTGAAGGACGACAGCATCGACAA |
| | CAAGGTGCTGACCCGGAGCGACAAGAACCGGGGCAAGAGCGACAACGTGCCCAGCGAGGAGGTGGTGAAGAAGATGAAG |
| | AACTACTGGCGGCAGCTGCTGAACGCCAAGCTGATCACCCAGCGGAAGTTCGACAACCTGACCAAGGCCGAGCGGGGCGG |
| | CCTGAGCGAGCTGGACAAGGCCGGCTTCATCAAGCGGCAGCTGGTGGAGACCCGGCAGATCACCAAGCACGTGGCCCAGA |
| | TCCTGGACAGCCGGATGAACACCAAGTACGACGAGAACGACAAGCTGATCCGGGAGGTGAAGGTGATCACCCTGAAGAGC |
| | AAGCTGGTGAGCGACTTCCGGAAGGACTTCCAGTTCTACAAGGTGCGGGAGATCAACAACTACCACCACGCCCACGACGC |
| | CTACCTGAACGCCGTGGTGGGCACCGCCCTGATCAAGAAGTACCCCAAGCTGGAGAGCGAGTTCGTGTACGGCGACTACA |
| | AGGTGTACGACGTGCGGAAGATGATCGCCAAGAGCGAGCAGGAGATCGGCAAGGCCACCGCCAAGTACTTCTTCTACAGC |
| | AACATCATGAACTTCTTCAAGACCGAGATCACCCTGGCCAACGGCGAGATCCGGAAGCGGCCCCTGATCGAGACCAACGG |
| | CGAGACCGGCGAGATCGTGTGGGACAAGGGCCGGGACTTCGCCACCGTGCGGAAGGTGCTGAGCATGCCCCAGGTGAACA |
| | TCGTGAAGAAGACCGAGGTGCAGACCGGCGGCTTCAGCAAGGAGAGCATCCTGCCCAAGCGGAACAGCGACAAGCTGATC |
| | GCCCGGAAGAAGGACTGGGACCCCAAGAAGTACGGCGGCTTCGACAGCCCCACCGTGGCCTACAGCGTGCTGGTGGTGGC |
| | CAAGGTGGAGAAGGGCAAGAGCAAGAAGCTGAAGAGCGTGAAGGAGCTGCTGGGCATCACCATCATGGAGCGGAGCAGC |
| | TTCGAGAAGAACCCCATCGACTTCCTGGAGGCCAAGGGCTACAAGGAGGTGAAGAAGGACCTGATCATCAAGCTGCCCAA |
| | GTACAGCCTGTTCGAGCTGGAGAACGGCCGGAAGCGGATGCTGGCCAGCGCCGGCGAGCTGCAGAAGGGCAACGAGCTGG |
| | CCCTGCCCAGCAAGTACGTGAACTTCCTGTACCTGGCCAGCCACTACGAGAAGCTGAAGGGCAGCCCCGAGGACAACGAG |
| | CAGAAGCAGCTGTTCGTGGAGCAGCACAAGCACTACCTGGACGAGATCATCGAGCAGATCAGCGAGTTCAGCAAGCGGGT |
| | GATCCTGGCCGACGCCAACCTGGACAAGGTGCTGAGCGCCTACAACAAGCACCGGGACAAGCCCATCCGGGAGCAGGCCG |
| | AGAACATCATCCACCTGTTCACCCTGACCAACCTGGGCGCCCCCGCCGCCTTCAAGTACTTCGACACCACCATCGACCGGA |
| | AGCGGTACACCAGCACCAAGGAGGTGCTGGACGCCACCCTGATCCACCAGAGCATCACCGGCCTGTACGAGACCCGGATC |
| | GACCTGAGCCAGCTGGGCGGCGACGGCAGCGGCAGCCCCAAGAAGAAGCGGAAGGTGGACGGCAGCCCCAAGAAGAAGC |
| | GGAAGGTGGACAGCGGCTGA |
| 515 | ATGGACAAGAAGTACAGCATCGGCCTGGACATCGGCACCAACAGCGTGGGCTGGGCCGTGATCACCGACGAGTACAAGGT |
| | GCCCAGCAAGAAGTTCAAGGTGCTGGGCAACACCGACCGGCACAGCATCAAGAAGAACCTGATCGGCGCCCTGCTGTTCG |
| | ACAGCGGCGAGACCGCCGAGGCCACCCGGCTGAAGCGGACCGCCCGGCGGCGGTACACCCGGCGGAAGAACCGGATCTG |
| | CTACCTGCAGGAGATCTTCAGCAACGAGATGGCCAAGGTGGACGACAGCTTCTTCCACCGGCTGGAGGAGAGCTTCCTGGT |
| | GGAGGAGGACAAGAAGCACGAGCGGCACCCCATCTTCGGCAACATCGTGGACGAGGTGGCCTACCACGAGAAGTACCCCA |
| | CCATCTACCACCTGCGGAAGAAGCTGGTGGACAGCACCGACAAGGCCGACCTGCGGCTGATCTACCTGGCCCTGGCCCAC |
| | ATGATCAAGTTCCGGGGCCACTTCCTGATCGAGGGCGACCTGAACCCCGACAACAGCGACGTGGACAAGCTGTTCATCCAG |
| | CTGGTGCAGACCTACAACCAGCTGTTCGAGGAGAACCCCATCAACGCCAGCGGCGTGGACGCCAAGGCCATCCTGAGCGC |
| | CCGGCTGAGCAAGAGCCGGCGGCTGGAGAACCTGATCGCCCAGCTGCCCGGCGAGAAGAAGAACGGCCTGTTCGGCAACC |
| | TGATCGCCCTGAGCCTGGGCCTGACCCCCAACTTCAAGAGCAACTTCGACCTGGCCGAGGACGCCAAGCTGCAGCTGAGCA |
| | AGGACACCTACGACGACGACCTGGACAACCTGCTGGCCCAGATCGGCGACCAGTACGCCGACCTGTTCCTGGCCGCCAAG |
| | AACCTGAGCGACGCCATCCTGCTGAGCGACATCCTGCGGGTGAACACCGAGATCACCAAGGCCCCCCTGAGCGCCAGCAT |
| | GATCAAGCGGTACGACGAGCACCACCAGGACCTGACCCTGCTGAAGGCCCTGGTGCGGCAGCAGCTGCCCGAGAAGTACA |
| | AGGAGATCTTCTTCGACCAGAGCAAGAACGGCTACGCCGGCTACATCGACGGCGGCGCCAGCCAGGAGGAGTTCTACAAG |
| | TTCATCAAGCCCATCCTGGAGAAGATGGACGGCACCGAGGAGCTGCTGGTGAAGCTGAACCGGGAGGACCTGCTGCGGAA |
| | GCAGCGGACCTTCGACAACGGCAGCATCCCCCACCAGATCCACCTGGGCGAGCTGCACGCCATCCTGCGGCGGCAGGAGG |
| | ACTTCTACCCCTTCCTGAAGGACAACCGGGAGAAGATCGAGAAGATCCTGACCTTCCGGATCCCCTACTACGTGGGCCCCC |
| | TGGCCCGGGGCAACAGCCGGTTCGCCTGGATGACCCGGAAGAGCGAGGAGACCATCACCCCCTGGAACTTCGAGGAGGTG |
| | GTGGACAAGGGCGCCAGCGCCCAGAGCTTCATCGAGCGGATGACCAACTTCGACAAGAACCTGCCCAACGAGAAGGTGCT |
| | GCCCAAGCACAGCCTGCTGTACGAGTACTTCACCGTGTACAACGAGCTGACCAAGGTGAAGTACGTGACCGAGGGCATGC |
| | GGAAGCCCGCCTTCCTGAGCGGCGAGCAGAAGAAGGCCATCGTGGACCTGCTGTTCAAGACCAACCGGAAGGTGACCGTG |
| | AAGCAGCTGAAGGAGGACTACTTCAAGAAGATCGAGTGCTTCGACAGCGTGGAGATCAGCGGCGTGGAGGACCGGTTCAA |
| | CGCCAGCCTGGGCACCTACCACGACCTGCTGAAGATCATCAAGGACAAGGACTTCCTGGACAACGAGGAGAACGAGGACA |
| | TCCTGGAGGACATCGTGCTGACCCTGACCCTGTTCGAGGACCGGGAGATGATCGAGGAGCGGCTGAAGACCTACGCCCAC |
| | CTGTTCGACGACAAGGTGATGAAGCAGCTGAAGCGGCGGCGGTACACCGGCTGGGGCCGGCTGAGCCGGAAGCTGATCAA |
| | CGGCATCCGGGACAAGCAGAGCGGCAAGACCATCCTGGACTTCCTGAAGAGCGACGGCTTCGCCAACCGGAACTTCATGC |
| | AGCTGATCCACGACGACAGCCTGACCTTCAAGGAGGACATCCAGAAGGCCCAGGTGAGCGGCCAGGGCGACAGCCTGCAC |
| | GAGCACATCGCCAACCTGGCCGGCAGCCCCGCCATCAAGAAGGGCATCCTGCAGACCGTGAAGGTGGTGGACGAGCTGGT |
| | GAAGGTGATGGGCCGGCACAAGCCCGAGAACATCGTGATCGAGATGGCCCGGGAGAACCAGACCACCCAGAAGGGCCAG |
| | AAGAACAGCCGGGAGCGGATGAAGCGGATCGAGGAGGGCATCAAGGAGCTGGGCAGCCAGATCCTGAAGGAGCACCCCG |
| | TGGAGAACACCCAGCTGCAGAACGAGAAGCTGTACCTGTACTACCTGCAGAACGGCCGGGACATGTACGTGGACCAGGAG |
| | CTGGACATCAACCGGCTGAGCGACTACGACGTGGACCACATCGTGCCCCAGAGCTTCCTGAAGGACGACAGCATCGACAA |
| | CAAGGTGCTGACCCGGAGCGACAAGAACCGGGGCAAGAGCGACAACGTGCCCAGCGAGGAGGTGGTGAAGAAGATGAAG |
| | AACTACTGGCGGCAGCTGCTGAACGCCAAGCTGATCACCCAGCGGAAGTTCGACAACCTGACCAAGGCCGAGCGGGGCGG |
| | CCTGAGCGAGCTGGACAAGGCCGGCTTCATCAAGCGGCAGCTGGTGGAGACCCGGCAGATCACCAAGCACGTGGCCCAGA |
| | TCCTGGACAGCCGGATGAACACCAAGTACGACGAGAACGACAAGCTGATCCGGGAGGTGAAGGTGATCACCCTGAAGAGC |
| | AAGCTGGTGAGCGACTTCCGGAAGGACTTCCAGTTCTACAAGGTGCGGGAGATCAACAACTACCACCACGCCCACGACGC |
| | CTACCTGAACGCCGTGGTGGGCACCGCCCTGATCAAGAAGTACCCCAAGCTGGAGAGCGAGTTCGTGTACGGCGACTACA |
| | AGGTGTACGACGTGCGGAAGATGATCGCCAAGAGCGAGCAGGAGATCGGCAAGGCCACCGCCAAGTACTTCTTCTACAGC |
| | AACATCATGAACTTCTTCAAGACCGAGATCACCCTGGCCAACGGCGAGATCCGGAAGCGGCCCCTGATCGAGACCAACGG |
| | CGAGACCGGCGAGATCGTGTGGGACAAGGGCCGGGACTTCGCCACCGTGCGGAAGGTGCTGAGCATGCCCCAGGTGAACA |
| | TCGTGAAGAAGACCGAGGTGCAGACCGGCGGCTTCAGCAAGGAGAGCATCCTGCCCAAGCGGAACAGCGACAAGCTGATC |
| | GCCCGGAAGAAGGACTGGGACCCCAAGAAGTACGGCGGCTTCGACAGCCCCACCGTGGCCTACAGCGTGCTGGTGGTGGC |
| | CAAGGTGGAGAAGGGCAAGAGCAAGAAGCTGAAGAGCGTGAAGGAGCTGCTGGGCATCACCATCATGGAGCGGAGCAGC |
| | TTCGAGAAGAACCCCATCGACTTCCTGGAGGCCAAGGGCTACAAGGAGGTGAAGAAGGACCTGATCATCAAGCTGCCCAA |
| | GTACAGCCTGTTCGAGCTGGAGAACGGCCGGAAGCGGATGCTGGCCAGCGCCGGCGAGCTGCAGAAGGGCAACGAGCTGG |
| | CCCTGCCCAGCAAGTACGTGAACTTCCTGTACCTGGCCAGCCACTACGAGAAGCTGAAGGGCAGCCCCGAGGACAACGAG |
| | CAGAAGCAGCTGTTCGTGGAGCAGCACAAGCACTACCTGGACGAGATCATCGAGCAGATCAGCGAGTTCAGCAAGCGGGT |
| | GATCCTGGCCGACGCCAACCTGGACAAGGTGCTGAGCGCCTACAACAAGCACCGGGACAAGCCCATCCGGGAGCAGGCCG |
| | AGAACATCATCCACCTGTTCACCCTGACCAACCTGGGCGCCCCCGCCGCCTTCAAGTACTTCGACACCACCATCGACCGGA |
| | AGCGGTACACCAGCACCAAGGAGGTGCTGGACGCCACCCTGATCCACCAGAGCATCACCGGCCTGTACGAGACCCGGATC |
| | GACCTGAGCCAGCTGGGCGGCGACTGA |

### Lipid Nanoparticle (LNP) Formulation

[0403] In general, the lipid nanoparticle components were dissolved in 100% ethanol at various molar ratios. The RNA cargos (e.g., Cas9 mRNA and sgRNA) were dissolved in 25 mM citrate, 100 mM NaCl, pH 5.0, resulting in a concentration of RNA cargo of approximately 0.45 mg/mL. The LNPs used in Examples 2-4 contained ionizable lipid ((9Z,12Z)-3-((4,4-bis(octyloxy)butanoyl)oxy)-2-((((3-(diethylamino)propoxy)carbonyl)oxy)methyl)propyl octadeca-9,12-dienoate, also called 3-((4,4-bis(octyloxy)butanoyl)oxy)-2-((((3-(diethylamino)propoxy)carbonyl)oxy)methyl)propyl (9Z,12Z)-octadeca-9,12-dienoate), cholesterol, DSPC, and PEG2k-DMG in a 50:38:9:3 molar ratio, respectively. The LNPs were formulated with a lipid amine to RNA phosphate (N:P) molar ratio of about 6, and a ratio of gRNA to mRNA of 1:1 by weight.

[0404] The LNPs were prepared using a cross-flow technique utilizing impinging jet mixing of the lipid in ethanol with two volumes of RNA solutions and one volume of water. The lipid in ethanol was mixed through a mixing cross with the two volumes of RNA solution. A fourth stream of water was mixed with the outlet stream of the cross through an inline tee (See WO2016010840 FIG. 2.). The LNPs were held for 1 hour at room temperature, and further diluted with water (approximately 1:1 v/v). Diluted LNPs were concentrated using tangential flow filtration on a flat sheet cartridge (Sartorius, 100kD MWCO) and then buffer exchanged using PD-10 desalting columns (GE) into 50 mM Tris, 45 mM NaCl, 5% (w/v) sucrose, pH 7.5 (TSS). The resulting mixture was then filtered using a 0.2 m sterile filter. The final LNP was stored at 4° C. or −80° C. until further use.

Human LDHA Guide Design and Human LDHA with Cynomolgus Homology Guide Design

[0405] Initial guide selection was performed in silico using a human reference genome (e.g., hg38) and user defined genomic regions of interest (e.g., LDHA protein coding exons), for identifying PAMs in the regions of interest. For each identified PAM, analyses were performed and statistics reported. gRNA molecules were further selected and rank-ordered based on a number of criteria known in the art (e.g., GC content, predicted on-target activity, and potential off-target activity).

[0406] A total of 84 guide RNAs were designed toward human LDHA (ENSG00000134333) targeting the protein exonic coding regions. Guides and corresponding genomic coordinates are provided above (Table 1). Forty of the guide RNAs have 100% homology with cynomolgus LDHA.

[0407] Additional guides were designed against a de novo Cynomolgus Macaque LDHA transcript. Raw data were obtained from published transcriptome sequencing of liver sample from a female Mauritian-origin Cynomolgus Macaque (NCBI SRA ID: SRR1758956; Peng et al. (2015), Nucleic Acids Research, Volume 43, Issue D1, Pages D737-D742). De novo transcriptome assembly was carried out using Trinity (v2.8.4; Grabherr et al. (2011), Nature Biotechnology, 29: 644-652) and SPAdes (v3.13.0; Bankevich et al. (2012), Journal of Computational Biology, 19:5). Both methods were able to assemble the LDHA transcripts, which were identified by comparing their sequences to LDHA protein (UniProt ID: Q9BE24) with BLAST (Altschul et al. (1990), Journal of Molecular Biology, 215:3, 403-410). Cas9 (mRNA/protein) and guide RNA delivery in vitro

[0408] Primary human liver hepatocytes (PHH) (Gibco, Lot #Hu8298 or Hu8296) and primary cynomolgus liver hepatocytes (PCH) (Gibco, Lot #Cy367 or In Vitro ADMET Laboratories, Inc. Lot #10281011) were thawed and resuspended in hepatocyte thawing medium with supplements (Gibco, Cat. CM7500) followed by centrifugation. The supernatant was discarded and the pelleted cells resuspended in hepatocyte plating medium plus supplement pack (Invitrogen, Cat. A1217601 and CM3000). Cells were counted and plated on Bio-coat collagen I coated 96-well plates (ThermoFisher, Cat. 877272) at a density of 33,000 cells/well for PHH and 50,000 cells/well for PCH. Plated cells were allowed to settle and adhere for 5 hours in a tissue culture incubator at 37° C. and 5% CO₂ atmosphere. After incubation cells were checked for monolayer formation and were washed once with hepatocyte culture medium (Takara, Cat. Y20020 and/or Invitrogen, Cat. A1217601 and CM4000).

[0409] For studies utilizing dgRNAs, individual crRNA and trRNA was pre-annealed by mixing equivalent amounts of reagent and incubating at 95° C. for 2 min and cooling to room temperature. The dual guide (dgRNA) consisting of pre-annealed crRNA and trRNA, was incubated with Spy Cas9 protein to form a ribonucleoprotein (RNP) complex. Cells were transfected with Lipofectamine RNAiMAX (ThermoFisher, Cat. 13778150) according to the manufacturer's protocol. Cells were transfected with an RNP containing Spy Cas9 (10 nM), individual guide (10 nM), tracer RNA (10 nM), Lipofectamine RNAiMAX (1.0 μL/well) and OptiMem.

[0410] For studies utilizing sgRNAs, guides were incubated with Spy Cas9 protein to form a ribonucleoprotein (RNP) complex. In studies utilizing RNP transfection, cells were transfected with Lipofectamine RNAiMAX (ThermoFisher, Cat. 13778150) according to the manufacturer's protocol. Cells were transfected with an RNP containing Spy Cas9 (10 nM), sgRNA (10 nM), Lipofectamine RNAiMAX (1.0 μL/well) and OptiMem. In studies utilizing electroporation, cells were electroporated with RNP containing Spy Cas9 (2 uM) and sgRNA (4 uM), utilizing the Lonza 4D-Nucleofector Core Unit (Cat. AAF-1002X), the 96-well Shuttle Device (Cat. AAM 10015), and the P3 Primary Cell Kit (Cat. V4XP-3960).

[0411] Primary human and cyno hepatocytes were also treated with LNPs as further described below. Cells were incubated at 37° C., 5% CO₂ for 48 hours prior to treatment with LNPs. LNPs were incubated in media containing 3% cynomolgus serum at 37° C. for 10 minutes and administered to cells in amounts as further provided herein.

[0412] Lipofection of Cas9 mRNA and gRNAs used pre-mixed lipid formulations in which the lipid components were reconstituted in 100% ethanol at a molar ratio of 50% Lipid A, 9% DSPC, 38% cholesterol, and 3% PEG2k-DMG. The lipid mixture was then mixed with RNA cargos (e.g., Cas9 mRNA and gRNA) at a lipid amine to RNA phosphate (N:P) molar ratio of about 6.0. Lipofections were performed with 6% cyno serum and a ratio of gRNA to mRNA of 1:1 by weight.

### Genomic DNA Isolation

[0413] PHH and PCH transfected cells were harvested post-transfection at 72 or 96 hours. The gDNA was extracted from each well of a 96-well plate using 50 μL/well BuccalAmp DNA Extraction solution (Epicentre, Cat. QE09050) according to manufacturer's protocol. All DNA samples were subjected to PCR and subsequent NGS analysis, as described herein.

### Next-Generation Sequencing (“NGS”) and Analysis for On-Target Cleavage Efficiency

[0414] To quantitatively determine the efficiency of editing at the target location in the genome, deep sequencing was utilized to identify the presence of insertions and deletions introduced by gene editing. PCR primers were designed around the target site within the gene of interest (e.g. LDHA), and the genomic area of interest was amplified. Primer sequence design was done as is standard in the field.

[0415] Additional PCR was performed according to the manufacturer's protocols (Illumina) to add chemistry for sequencing. The amplicons were sequenced on an Illumina MiSeq instrument. The reads were aligned to the reference genome (e.g., hg38) after eliminating those having low quality scores. The resulting files containing the reads were mapped to the reference genome (BAM files), where reads that overlapped the target region of interest were selected and the number of wild type reads versus the number of reads which contain an insertion or deletion (“indel”) was calculated.

[0416] The editing percentage (e.g., the “editing efficiency” or “percent editing”) is defined as the total number of sequence reads with insertions or deletions (“indels”) over the total number of sequence reads, including wild type.

### Lactate Dehydrogenase a (LDHA) Protein Analysis by Western Blot

[0417] Primary human hepatocytes were treated with LNP formulated with select guides from Table 1 as further described in Example 3. LNPs were incubated in media (Takara, Cat. Y20020) containing 3% cynomolgus serum at 37° C. for 10 minutes. Post-incubation the LNPs were added to the human hepatocytes. Twenty-one days post-transfection, the media was removed and the cells were lysed with 50 μL/well RIPA buffer (Boston Bio Products, Cat. BP-115) plus freshly added protease inhibitor mixture consisting of complete protease inhibitor cocktail (Sigma, Cat. 11697498001), 1 mM DTT, and 250 U/ml Benzonase (EMD Millipore, Cat. 71206-3). Cells were kept on ice for 30 minutes at which time NaCl (1 M final concentration) was added. Cell lysates were thoroughly mixed and retained on ice for 30 minutes. The whole cell extracts (“WCE”) were transferred to a PCR plate and centrifuged to pellet debris. A Bradford assay (Bio-Rad, Cat. 500-0001) was used to assess protein content of the lysates. The Bradford assay procedure was completed according to the manufacturer's protocol. Extracts were stored at −20° C. prior to use.

[0418] AGT-deficient mice were treated with LNP formulated with select guides as further described in Example 4. Livers were harvested from the mice post-treatment and 60 mg portions were used for protein extraction. The samples were placed in bead tubes (MP Biomedical, Cat. 6925-500) and lysed with 600 μL/sample of RIPA buffer (Boston Bio Products, Cat. BP-115) plus freshly added protease inhibitor mixture consisting of complete protease inhibitor cocktail (Sigma, Cat. 116974500) and homogenized at 5.0 m/sec. The samples were then centrifuged at 14,000 RPM for 10 min. at 4° C. and the liquid was transferred to a new tube. A final centrifugation was performed at 14,000 RPM for 10 min. and the samples were quantified using a Bradford assay as described above.

[0419] A western blot was performed to assess LDHA protein levels. Lysates were mixed with Laemmli buffer and denatured at 95° C. for 10 minutes. The blot was run using the NuPage system on 10% Bis-Tris gels (Thermo Fisher Scientific, Cat. NPO302BOX) according to the manufacturer's protocol followed by wet transfer onto 0.45 μm nitrocellulose membrane (Bio-Rad, Cat. 1620115). After the transfer membrane was rinsed thoroughly with water and stained with Ponceau S solution (Boston Bio Products, Cat. ST-180) to confirm complete and even transfer. The blot was blocked using 5% Dry Milk in TBS for 30 minutes on a lab rocker at room temperature. The blot was rinsed with TBST and probed with rabbit α-LDHA polyclonal antibody (Sigma, Cat. SAB2108638 for cell lysate or Genetex, Cat. GTX101416 for mouse liver lysate) at 1:1000 in TBST. For blots with in vitro cell lysate, beta-actin was used as a loading control (Novus, Cat. NB600-501) at 1:1000 in TBST and incubated simultaneously with the LDHA primary antibody. For blots with in vivo mouse liver extracts, GAPDH was used as a loading control (Abcam, ab8245) at 1:1000 in TBST and incubated simultaneously with the LDHA primary antibody. The blot was sealed in a bag and kept overnight at 4° C. on a lab rocker. After incubation, the blot was rinsed 3 times for 5 minutes each in TBST and probed with secondary antibodies to Mouse and Rabbit (Thermo Fisher Scientific, Cat. PI35518 and PISA535571) at 1:12,500 each in TBST for 30 minutes at room temperature. After incubation, the blot was rinsed 3 times for 5 minutes each in TBST and 2 times with PBS. The blot was visualized and analyzed using a Licor Odyssey system.

### Lactate Dehydrogenase a (LDHA) Protein Analysis by Immunohistochemical Staining

[0420] For visual LDHA protein analysis of mouse livers, standard immunohistochemical staining was conducted on a Lecia Bond Rxm. For antigen retrieval (HIER), slides were heated in a pH 9 EDTA-based buffer for 25 minutes at 94° C., followed by a 30 minute antibody incubation at 1:500 (Abcam Cat. Ab52488). Antibody binding was detected using an HRP-conjugated secondary polymer, followed by chromogenic visualization with diaminobenzidine.

Measurement of LDH Activity from Mouse Muscle and Liver

[0421] A biochemical method (e.g., Wood K D et al., Biochim Biophys Acta Mol Basis Dis. 2019 Sep. 1; 1865(9):2203-2209; PMC6613992) was used for lactate dehydrogenase activity. For measurement of lactate dehydrogenase activity, tissue was homogenized in iced cold lysis buffer (25 mM HEPES, pH 7.3, 0.1% Triton-X-100) with probe sonication to give a 10% wt/vol lysate. LDH activity was measured by the increased in absorbance at 340 nm with the reduction of NAD to NADH in the presence of lactate. Lactate to pyruvate activity of LDG was measured with 20 mM lactate, 100 mM Tris-HCL, pH 9.0, 2 mM NAD+, 0.01% liver lysate. A Cooomassie Plus protein assay kit (Pierce, Rockford, IL), with bovine serum albumin (BSA) as the standard, was used to determine protein concentration in tissue lysates.

Measurement of Oxalate, Creatinine, Pyruvate, and Lactate from Mouse Samples

[0422] For oxalate determination, part of the urine collection was acidified to pH between 1 and 2 with HCl prior to storage at −80° C. to prevent any possible oxalate crystallization that could occur with cold storage and/or oxalogensis associated with alkalinization. The remaining nonacidified urine was frozen at −80° C. for the measurement of creatinine. Plasma preparations were filtered through Nano-sep centrifugal filters (VWR International, Batavia, IL) with a 10,000 nominal molecular weight limit to remove macromolecules prior to ion chromatography coupled with mass spectrometry or ICMS (Thermo Fisher Scientific Inc., Waltham, MA). Centrifugal filters were washed with 10 mM HCl prior to sample filtration to remove any contaminating trace organic acids trapped in the filter device. Liver tissue was extracted with 10% (wt/vol) trichloroacetic acid (TCA) for organic acid analysis. These organic acids were measured by ICMS following removal of TCA by vigorous vortexing with an equal volume of 1,1,2-trichlorotrifluoroethane (Freon)-trioctylamine (3:1, vol/vol; Aldrich, Milwaukee, WI), centrifuging at 4° C. to promote phase separation, and collecting the upper aqueous layer for analysis. Urinary creatinine was measured on a chemical analyzer, and urinary oxalate by ICMS, as previously described.

[0423] Selected-ion monitoring (SIM) at the following mass/charge ratios and cone voltages were used to quantify lactate (SIM 89.0, 35 V) and 13C3-lactate (SIM 92.0, 35 V). Pyruviate was measured by IC/MS with an AS11-HC 4 m, 2×150 mm, anion exchange column at a controlled temperature of 30° C. and a Dionex™ ERS™ 500 anion electrolytically regenerated suppressor. A gradient of KOH from 0.5 to 80 mM over 60 min at a flow rate of 0.38 ml/min was used to separate sample anions. The mass spectrometer (MSQ-PLUS) was operated in ESI negative mode, needle voltage 1.5 V, 500° C. source temperature, and column eluent was mixed with 50% acetonitrile at 0.38 ml/min using a zero dead volume mixing tee prior to entry into the MSQ. Selected-ion monitoring (SIM) at the following mass/charge ratios and cone voltages were used to pyruvate (SIM 87.0, 30 V).

### Example 2—Screening and Guide Qualification

### Cross Screening of LDHA Guides in Primary Hepatocytes

[0424] Guides targeting human LDHA and those with homology in cynomolgus monkey were transfected into primary human (via RNP transfection) and cynomolgus hepatocytes (via RNP electroporation) as described in Example 1. Percent editing was determined for sgRNAs comprising each guide sequence across each cell type. The screening data for the guide sequences in Table 1 in both cell lines are listed below (Tables 4-5).

[0425] Table 4 shows the average and standard deviation of duplicate samples for 00 Edit, 0% Insertion (Ins), and 0% Deletion (Del) for the LDHA transfected as RNP into primary human hepatocytes. N=2.

TABLE 4
LDHA editing data for sgRNAs delivered to primary
human hepatocytes via RNP transfection

| | Avg | Std Dev | Avg | Std Dev | Avg | Std Dev |
|---|---|---|---|---|---|---|
| GUIDE ID | % Edit | % Edit | % Ins | % Ins | % Del | % Del |
| G009440 | 9.50 | 4.10 | 2.45 | 0.92 | 7.05 | 3.18 |
| G012089 | 38.15 | 3.18 | 12.10 | 0.14 | 26.00 | 3.25 |
| G012090 | 11.85 | 3.89 | 1.45 | 0.49 | 10.60 | 3.39 |
| G012092 | 22.75 | 2.76 | 4.00 | 0.14 | 19.65 | 2.62 |
| G012093 | 34.60 | 0.28 | 8.95 | 0.21 | 25.60 | 0.42 |
| G012094 | 20.50 | 0.42 | 14.30 | 0.85 | 6.35 | 1.34 |
| G012095 | 28.45 | 2.33 | 3.50 | 0.71 | 25.00 | 2.97 |
| G012096 | 32.30 | 0.42 | 0.70 | 0.00 | 31.75 | 0.49 |
| G012097 | 24.65 | 1.34 | 3.95 | 1.06 | 20.75 | 2.33 |
| G012098 | 6.25 | 1.77 | 2.10 | 0.57 | 4.30 | 1.13 |
| G012099 | 12.20 | 1.84 | 5.10 | 0.85 | 7.10 | 0.99 |
| G012100 | 9.40 | 1.13 | 6.95 | 0.78 | 2.45 | 0.35 |
| G012101 | 3.60 | 0.85 | 1.45 | 0.35 | 2.15 | 0.49 |
| G012103 | 34.90 | 3.11 | 2.30 | 0.00 | 32.70 | 3.25 |
| G012104 | 5.85 | 2.33 | 0.25 | 0.21 | 5.60 | 2.12 |
| G012105 | 23.45 | 0.78 | 8.45 | 0.49 | 15.15 | 1.34 |
| G012106 | 5.80 | 1.56 | 1.60 | 0.14 | 4.20 | 1.41 |
| G012107 | 2.85 | 0.21 | 0.75 | 0.21 | 2.20 | 0.28 |
| G012108 | 14.50 | 0.57 | 0.80 | 0.14 | 13.75 | 0.64 |
| G012109 | 12.40 | 0.71 | 0.65 | 0.07 | 11.80 | 0.71 |
| G012110 | 12.00 | 1.98 | 3.85 | 0.49 | 8.35 | 1.48 |
| G012111 | 27.20 | 0.28 | 16.40 | 0.14 | 10.85 | 0.07 |
| G012112 | 3.85 | 1.34 | 0.95 | 0.35 | 2.95 | 1.06 |
| G012113 | 9.45 | 2.62 | 2.05 | 1.06 | 7.40 | 1.56 |
| G012114 | 7.05 | 0.78 | 1.95 | 0.07 | 5.10 | 0.85 |
| G012115 | 31.10 | 7.64 | 12.40 | 3.25 | 18.90 | 4.24 |
| G012116 | 12.55 | 1.34 | 4.85 | 0.07 | 7.80 | 1.41 |
| G012117 | 10.40 | 1.41 | 3.40 | 0.00 | 7.40 | 1.56 |
| G012118 | 21.95 | 3.32 | 2.35 | 0.35 | 19.60 | 2.97 |
| G012119 | 15.50 | 3.68 | 0.50 | 0.14 | 14.95 | 3.46 |
| G012120 | 22.05 | 4.88 | 1.70 | 0.71 | 20.45 | 4.31 |
| G012121 | 10.90 | 0.28 | 3.45 | 0.21 | 7.65 | 0.64 |
| G012122 | 2.60 | 0.28 | 0.40 | 0.00 | 2.20 | 0.28 |
| G012123 | 6.80 | 0.85 | 1.90 | 0.14 | 4.90 | 0.71 |
| G012124 | 10.90 | 2.40 | 1.30 | 0.14 | 9.70 | 2.26 |
| G012125 | 6.10 | 0.42 | 0.85 | 0.21 | 5.35 | 0.64 |
| G012126 | 1.85 | 0.21 | 0.50 | 0.00 | 1.35 | 0.21 |
| G012127 | 10.05 | 1.20 | 0.85 | 0.21 | 9.30 | 1.41 |
| G012128 | 6.20 | 0.14 | 1.05 | 0.21 | 5.20 | 0.28 |
| G012129 | 6.40 | 0.71 | 0.45 | 0.07 | 6.00 | 0.57 |
| G012130 | 1.00 | 0.14 | 0.55 | 0.07 | 0.55 | 0.07 |
| G012131 | 3.15 | 0.21 | 0.70 | 0.28 | 2.55 | 0.35 |
| G012132 | 17.90 | 1.84 | 11.50 | 2.12 | 6.45 | 0.21 |
| G012133 | 23.45 | 0.64 | 6.70 | 0.14 | 16.75 | 0.49 |
| G012134 | 4.45 | 0.07 | 1.70 | 0.00 | 2.85 | 0.07 |
| G012135 | 16.80 | 0.71 | 4.30 | 0.42 | 12.60 | 0.42 |
| G012136 | 38.65 | 0.92 | 0.90 | 0.00 | 37.80 | 0.99 |
| G012137 | 1.10 | 0.28 | 0.30 | 0.14 | 0.80 | 0.14 |
| G012138 | 17.35 | 3.75 | 4.70 | 0.99 | 12.85 | 2.76 |
| G012139 | 6.30 | 0.57 | 0.45 | 0.35 | 5.85 | 0.21 |
| G012140 | 14.65 | 2.33 | 4.30 | 1.84 | 10.45 | 0.49 |
| G012141 | 0.95 | 0.07 | 0.35 | 0.07 | 0.65 | 0.07 |
| G012142 | 32.35 | 0.92 | 30.85 | 1.06 | 19.55 | 0.64 |
| G012143 | 3.35 | 0.07 | 1.75 | 0.07 | 1.60 | 0.00 |
| G012149 | 17.65 | 0.35 | 1.50 | 0.57 | 16.20 | 0.14 |
| G012150 | 12.65 | 0.64 | 9.50 | 0.85 | 3.20 | 0.14 |
| G012151 | 12.90 | 0.14 | 6.70 | 0.14 | 6.25 | 0.21 |
| G012152 | 4.80 | 0.14 | 0.80 | 0.14 | 4.10 | 0.00 |
| G012154 | 11.45 | 2.90 | 4.85 | 1.06 | 6.65 | 1.91 |
| G012156 | 7.85 | 1.34 | 3.70 | 0.42 | 4.30 | 0.85 |
| G012158 | 10.90 | 1.56 | 2.20 | 0.57 | 8.70 | 0.99 |
| G012159 | 11.35 | 0.49 | 2.35 | 0.07 | 9.10 | 0.57 |
| G012160 | 10.40 | 0.42 | 2.00 | 0.28 | 8.45 | 0.07 |
| G012162 | 3.95 | 0.49 | 1.75 | 0.35 | 2.30 | 0.14 |
| G012165 | 27.95 | 3.04 | 1.40 | 0.71 | 26.55 | 2.47 |
| G012167 | 27.95 | 1.06 | 18.70 | 0.57 | 9.35 | 0.49 |
| G012168 | 9.90 | 1.27 | 0.50 | 0.28 | 9.50 | 0.99 |
| G012169 | 20.20 | 2.97 | 4.05 | 0.78 | 16.30 | 2.12 |
| G012171 | 19.15 | 1.34 | 2.90 | 0.71 | 16.40 | 0.57 |
| G012172 | 15.85 | 2.47 | 2.15 | 0.35 | 13.85 | 2.19 |
| G012173 | 11.10 | 0.14 | 6.60 | 0.14 | 4.55 | 0.07 |

[0426] Table 5 shows the average and standard deviation for 00 Edit, 0% Insertion (Ins), and 0% Deletion (Del) for the tested LDHA sgRNAs electroporated with RNP in primary cynomolgus hepatocytes. N=2.

TABLE 5
LDHA editing data for sgRNAs delivered to primary
cynomolgus hepatocytes via RNP electroporation

| GUIDE | Avg | Std Dev | Avg | Std Dev | Avg | Std Dev |
|---|---|---|---|---|---|---|
| ID | % Edit | % Edit | % Ins | % Ins | % Del | % Del |
| G012090 | 11.40 | 8.34 | 0.20 | 0.14 | 11.30 | 8.20 |
| G012143 | 4.75 | 0.92 | 2.25 | 0.07 | 2.60 | 0.85 |
| G012145 | 4.10 | 1.70 | 0.15 | 0.07 | 3.95 | 1.63 |
| G012146 | 9.60 | 2.69 | 3.50 | 1.70 | 6.20 | 1.13 |
| G012147 | 0.20 | 0.00 | 0.00 | 0.00 | 0.15 | 0.07 |
| G012148 | 36.30 | 1.70 | 12.80 | 0.28 | 23.90 | 1.56 |
| G012149 | 31.00 | 3.82 | 1.30 | 0.00 | 29.65 | 3.75 |
| G012150 | 30.35 | 19.16 | 18.60 | 14.00 | 11.95 | 5.16 |
| G012151 | 65.05 | 4.45 | 36.60 | 2.26 | 28.50 | 2.12 |
| G012152 | 19.50 | 0.14 | 0.55 | 0.21 | 19.05 | 0.21 |
| G012153 | 0.90 | 0.42 | 0.05 | 0.07 | 0.85 | 0.35 |
| G012154 | 47.50 | 0.99 | 28.60 | 3.68 | 19.00 | 2.55 |
| G012155 | 65.55 | 3.32 | 2.25 | 0.21 | 63.65 | 3.18 |
| G012156 | 17.60 | 9.05 | 3.05 | 0.92 | 14.55 | 8.27 |
| G012157 | 42.80 | 6.36 | 7.70 | 0.28 | 35.10 | 6.65 |
| G012158 | 31.95 | 17.47 | 4.35 | 3.04 | 27.70 | 14.57 |
| G012159 | 44.70 | 1.41 | 3.60 | 0.28 | 41.10 | 1.13 |
| G012160 | 34.70 | 1.70 | 7.55 | 0.78 | 27.20 | 2.40 |
| G012161 | 25.75 | 6.58 | 5.75 | 3.18 | 20.20 | 3.39 |
| G012162 | 14.50 | 3.82 | 6.55 | 0.35 | 8.10 | 3.54 |
| G012163 | 28.30 | 4.53 | 0.40 | 0.00 | 28.00 | 4.53 |
| G012164 | 57.85 | 2.33 | 3.65 | 0.35 | 54.20 | 2.69 |
| G012165 | 42.75 | 14.07 | 1.30 | 0.14 | 41.45 | 13.93 |
| G012166 | 57.55 | 5.30 | 39.70 | 3.11 | 17.90 | 2.12 |
| G012167 | 47.95 | 12.94 | 23.50 | 6.65 | 24.70 | 6.08 |
| G012168 | 21.80 | N/A | 0.10 | N/A | 21.80 | N/A |
| G012169 | 58.25 | 5.73 | 2.50 | 0.57 | 55.85 | 5.30 |
| G012170 | 17.55 | 4.60 | 5.40 | 0.42 | 12.15 | 4.17 |
| G012171 | 49.25 | 9.83 | 6.75 | 3.04 | 42.55 | 6.86 |
| G012172 | 19.10 | 3.68 | 1.45 | 0.35 | 17.65 | 3.32 |
| G012173 | 21.35 | 8.27 | 7.75 | 3.18 | 13.65 | 5.16 |

[0427] Table 6 shows the average and standard deviation for 00 Edit across multiple chromosomal locations for the tested LDHA sgRNAs in primary cynomolgus hepatocytes using lipofection at 30 nM concentration of sgRNA. N=2.

TABLE 6
LDHA editing data for sgRNAs delivered
to primary cynomolgus hepatocytes

| | Chr12 | Chr12 | Chr14 | Chr14 | Chr17 | Chr17 |
|---|---|---|---|---|---|---|
| | Avg | Std Dev | Avg | Std Dev | Avg | Std Dev |
| GUIDE ID | % Edit | % Edit | % Edit | % Edit | % Edit | % Edit |
| G015538 | 0.0 | 0.0 | 0.0 | 0.0 | 0.0 | 0.0 |
| G015539 | 0.0 | 0.0 | 19.4 | 3.5 | 0.0 | 0.0 |
| G015540 | 0.0 | 0.0 | 34.6 | 0.5 | 0.0 | 0.0 |
| G015541 | 59.3 | 6.7 | 0.0 | 0.0 | 59.3 | 5.4 |
| G015542 | 0.0 | 0.0 | 0.0 | 0.0 | 31.7 | 1.1 |
| G015543 | 0.0 | 0.0 | 27.0 | 1.6 | 0.0 | 0.0 |
| G015544 | 0.0 | 0.0 | 7.6 | 0.8 | 0.0 | 0.0 |
| G015545 | 0.0 | 0.0 | 9.3 | 1.7 | 0.0 | 0.0 |
| G015546 | 0.0 | 0.0 | 0.0 | 0.0 | 0.0 | 0.0 |
| G015547 | 0.0 | 0.0 | 58.6 | 4.2 | 0.0 | 0.0 |
| G015548 | 0.0 | 0.0 | 32.5 | 4.0 | 0.0 | 0.0 |
| G015549 | 0.0 | 0.0 | 9.4 | 5.1 | 0.0 | 0.0 |
| G015550 | 15.0 | 4.2 | 0.0 | 0.0 | 15.9 | 4.3 |
| G015551 | 0.0 | 0.0 | 6.7 | 3.5 | 0.0 | 0.0 |
| G015552 | 25.7 | 16.6 | 0.0 | 0.0 | 26.7 | 16.0 |
| G015553 | 21.6 | 0.0 | 0.0 | 0.0 | 25.1 | 9.7 |
| G015554 | 0.0 | 0.0 | 20.4 | 7.4 | 0.0 | 0.0 |
| G015555 | 0.0 | 0.0 | 32.3 | 14.0 | 0.0 | 0.0 |
| G015556 | 0.0 | 0.0 | 0.0 | 0.0 | 0.0 | 0.0 |
| G015557 | 0.0 | 0.0 | 8.6 | 5.3 | 4.0 | 0.0 |
| G015558 | 0.0 | 0.0 | 15.9 | 11.2 | 0.0 | 0.0 |
| G015559 | 0.0 | 0.0 | 0.0 | 0.0 | 0.0 | 0.0 |
| G015560 | 0.0 | 0.0 | 36.7 | 0.0 | 0.0 | 0.0 |
| G015561 | 0.0 | 0.0 | 42.1 | 0.0 | 0.0 | 0.0 |
| G015562 | 51.6 | 0.0 | 0.0 | 0.0 | 43.8 | 0.0 |
| G015563 | 37.2 | 0.0 | 0.0 | 0.0 | 38.3 | 0.0 |
| G015564 | 44.9 | 0.0 | 0.0 | 0.0 | 40.2 | 0.0 |
| G015565 | 0.0 | 0.0 | 0.0 | 0.0 | 0.0 | 0.0 |
| G015566 | 35.6 | 0.0 | 0.0 | 0.0 | 36.5 | 0.0 |
| G015567 | 0.0 | 0.0 | 3.6 | 0.0 | 0.0 | 0.0 |
| G015568 | 0.0 | 0.0 | 10.3 | 3.0 | 0.0 | 0.0 |
| G015569 | 0.0 | 0.0 | 22.6 | 0.9 | 0.0 | 0.0 |
| G015570 | 0.0 | 0.0 | 17.4 | 1.0 | 0.0 | 0.0 |
| G015571 | 0.0 | 0.0 | 98.0 | 0.2 | 0.0 | 0.0 |
| G015572 | 0.0 | 0.0 | 14.7 | 0.7 | 0.0 | 0.0 |
| G015573 | 0.0 | 0.0 | 7.6 | 2.0 | 0.0 | 0.0 |
| G015574 | 0.0 | 0.0 | 15.8 | 3.8 | 0.0 | 0.0 |
| G015575 | 0.0 | 0.0 | 0.0 | 0.0 | 27.0 | 4.2 |
| G015576 | 0.0 | 0.0 | 0.0 | 0.0 | 16.5 | 2.5 |
| G015577 | 0.0 | 0.0 | 0.0 | 0.0 | 27.8 | 5.4 |
| G015578 | 0.0 | 0.0 | 0.0 | 0.0 | 0.0 | 0.0 |
| G015579 | 41.4 | 1.0 | 0.0 | 0.0 | 42.2 | 1.9 |
| G015580 | 17.4 | 0.0 | 0.0 | 0.0 | 24.2 | 1.6 |
| G015581 | 6.2 | 0.5 | 0.0 | 0.0 | 6.3 | 0.1 |
| G015582 | 0.0 | 0.0 | 0.0 | 0.0 | 0.0 | 0.0 |
| G015583 | 0.0 | 0.0 | 27.8 | 2.2 | 0.0 | 0.0 |
| G015584 | 0.0 | 0.0 | 6.5 | 0.0 | 0.0 | 0.0 |
| G015585 | 0.0 | 0.0 | 4.3 | 1.3 | 0.0 | 0.0 |
| G015586 | 0.0 | 0.0 | 20.5 | 0.8 | 15.0 | 1.1 |
| G015587 | 0.0 | 0.0 | 40.6 | 3.2 | 0.0 | 0.0 |
| G015588 | 0.0 | 0.0 | 21.2 | 1.2 | 0.0 | 0.0 |
| G015589 | 0.0 | 0.0 | 22.4 | 0.8 | 0.0 | 0.0 |
| G015590 | 0.0 | 0.0 | 29.3 | 4.3 | 0.0 | 0.0 |
| G015591 | 0.0 | 0.0 | 38.8 | 2.3 | 0.0 | 0.0 |
| G015592 | 0.0 | 0.0 | 0.0 | 0.0 | 0.0 | 0.0 |
| G015593 | 0.0 | 0.0 | 9.8 | 1.3 | 0.0 | 0.0 |
| G015594 | 0.0 | 0.0 | 41.4 | 6.4 | 0.0 | 0.0 |
| G015595 | 0.0 | 0.0 | 0.0 | 0.0 | 0.0 | 0.0 |
| G015596 | 0.0 | 0.0 | 5.1 | 2.7 | 0.0 | 0.0 |
| G015597 | 0.0 | 0.0 | 12.1 | 2.2 | 0.0 | 0.0 |
| G015598 | 0.0 | 0.0 | 25.6 | 3.5 | 0.0 | 0.0 |
| G015599 | 0.0 | 0.0 | 25.6 | 1.8 | 0.0 | 0.0 |
| G015600 | 35.9 | 4.7 | 0.0 | 0.0 | 38.4 | 7.6 |
| G015601 | 23.6 | 0.6 | 0.0 | 0.0 | 24.1 | 1.1 |
| G015602 | 0.0 | 0.0 | 37.6 | 1.7 | 0.0 | 0.0 |
| G015603 | 0.0 | 0.0 | 17.7 | 0.3 | 0.0 | 0.0 |
| G015604 | 53.5 | 7.2 | 0.0 | 0.0 | 72.6 | 2.5 |
| G015605 | 12.3 | 2.8 | 0.0 | 0.0 | 13.5 | 1.2 |
| G015606 | 30.5 | 0.8 | 0.0 | 0.0 | 27.3 | 1.6 |
| G015607 | 10.9 | 2.9 | 0.0 | 0.0 | 11.5 | 0.5 |
| G015608 | 0.0 | 0.0 | 0.0 | 0.0 | 20.3 | 1.5 |
| G015609 | 0.0 | 0.0 | 0.0 | 0.0 | 0.0 | 0.0 |
| G015610 | 0.0 | 0.0 | 29.5 | 0.3 | 0.0 | 0.0 |
| G015611 | 0.0 | 0.0 | 14.8 | 1.0 | 0.0 | 0.0 |
| G015612 | 0.00 | 0.00 | 2.00 | 0.00 | 22.90 | 0.00 |
| G015613 | 0.00 | 0.00 | 32.90 | 0.85 | 33.90 | 2.55 |
| G015614 | 0.00 | 0.00 | 0.00 | 0.00 | 12.25 | 0.64 |
| G015615 | 0.00 | 0.00 | 0.00 | 0.00 | 30.05 | 1.91 |
| G015616 | 0.00 | 0.00 | 0.00 | 0.00 | 5.25 | 0.21 |
| G015617 | 0.00 | 0.00 | 0.00 | 0.00 | 36.15 | 0.64 |
| G015618 | 0.00 | 0.00 | 0.00 | 0.00 | 8.75 | 0.92 |
| G015619 | 2.45 | 0.35 | 0.00 | 0.00 | 3.85 | 0.49 |
| G015620 | 0.00 | 0.00 | 0.00 | 0.00 | 18.25 | 2.90 |
| G015621 | 0.00 | 0.00 | 0.00 | 0.00 | 46.70 | 0.71 |
| G015622 | 41.60 | 2.83 | 3.05 | 1.06 | 0.00 | 0.00 |
| G015623 | 15.60 | 0.42 | 1.15 | 0.35 | 0.00 | 0.00 |
| G015624 | 0.00 | 0.00 | 1.70 | 0.57 | 0.00 | 0.00 |
| G015625 | 0.00 | 0.00 | 0.00 | 0.00 | 22.50 | 1.70 |
| G015626 | 0.00 | 0.00 | 0.00 | 0.00 | 50.45 | 1.48 |
| G015627 | 0.00 | 0.00 | 0.00 | 0.00 | 24.60 | 0.85 |
| G015628 | 0.00 | 0.00 | 0.00 | 0.00 | 8.70 | 1.27 |
| G015629 | 0.00 | 0.00 | 0.00 | 0.00 | 50.55 | 0.07 |
| G015630 | 17.10 | 0.28 | 0.00 | 0.00 | 0.00 | 0.00 |

[0428] Based on the primary human and primary cyno hepatocyte editing data, a subset of guide sequences were further evaluated. This subset is provided in Tables 7 and 8, with the corresponding editing data from primar hepatocyte screens reproduced.

TABLE 7
LDHA editing data for sgRNAs in primary human
hepatocytes chosen for further analysis in PHH

| GUIDE ID | % Edit (from Table 4 above) |
|---|---|
| G012089 | 38.15 |
| G012093 | 34.60 |
| G012095 | 28.45 |
| G012096 | 32.30 |
| G012103 | 34.90 |
| G012111 | 27.20 |
| G012115 | 31.10 |
| G012120 | 22.05 |
| G012133 | 23.45 |
| G012136 | 38.65 |

TABLE 8
LDHA editing data for sgRNAs in primary cynomolgus
hepatocytes chosen for further analysis in PCH

| GUIDE ID | % Edit (from Table 5 above) |
|---|---|
| G012151 | 65.05 |
| G012155 | 65.55 |
| G012157 | 42.8 |
| G012159 | 44.7 |
| G012162 | 14.5 |
| G012164 | 57.85 |
| G012165 | 42.75 |
| G012166 | 57.55 |
| G012167 | 47.95 |
| G012169 | 58.25 |

### Off-Target Analysis of LDHA Guides

[0429] A biochemical method (See, e.g., Cameron et al., Nature Methods. 6, 600-606; 2017) was used to determine potential off-target genomic sites cleaved by Cas9 targeting LDHA. In this experiment, 10 modified sgRNA targeting human LDHA (and two control guides with known off-target profiles) were screened using isolated HEK293 genomic DNA and the potential off-target results were plotted in FIG. 1. The assay identified potential off-target sites for the sgRNAs tested.

### Targeted Sequencing for Validating Potential Off-Target Sites

[0430] In known off-target detection assays such as the biochemical method used above, a large number of potential off-target sites are typically recovered, by design, so as to “cast a wide net” for potential sites that can be validated in other contexts, e.g., in a primary cell of interest. For example, the biochemical method typically overrepresents the number of potential off-target sites as the assay utilizes purified high molecular weight genomic DNA free of the cell environment and is dependent on the dose of Cas9 RNP used. Accordingly, potential off-target sites identified by these methods may be validated using targeted sequencing of the identified potential off-target sites.

[0431] In one approach, primary hepatocytes are treated with LNPs comprising Cas9 mRNA and a sgRNA of interest (e.g., a sgRNA having potential off-target sites for evaluation). The primary hepatocytes are then lysed and primers flanking the potential off-target site(s) are used to generate an amplicon for NGS analysis. Identification of indels at a certain level may validate potential off-target site, whereas the lack of indels found at the potential off-target site may indicate a false positive in the off-target assay that was utilized.

Cross Screening of Lipid Nanoparticle (LNP) Formulations Containing Spy Cas9 mRNA and sgRNA in Primary Human and Cynomolgus Hepatocytes

[0432] Lipid nanoparticle (LNP) formulations of modified sgRNAs targeting human LDHA and those homologous in cyno were tested on primary human hepatocytes and primary cynomolgus hepatocytes in a dose response assay. The LNPs were formulated as described in Example 1. Primary human and cynomolgus hepatocytes were plated as described in Example 1. Both cell lines were incubated at 37° C., 5% CO₂ for 48 hours prior to treatment with LNPs. LNPs were incubated in media containing 6% cynomolgus serum at 37° C. for 10 minutes. Post-incubation the LNPs were added to the human or cynomolgus hepatocytes in an 8 point 3-fold dose response curve starting at 300ng Cas9 mRNA. The cells were lysed 96 hours post-treatment for NGS analysis as described in Example 1. The dose response curve data for the guide sequences in both cell lines is shown inFIGS. 2 and 3. The percent editing at the 22 nM concentration are listed below in Tables 9 and 10.

[0433] Table 9 shows the average and standard deviation for 0% Edit, % Insertion (Ins), and % Deletion (Del) for the tested LDHA sgRNAs at 22 nM delivered with Spy Cas9 via LNP in primary human hepatocytes. These samples were generated in duplicate.

TABLE 9
LDHA editing data for sgRNAs/Cas9 mRNA delivered to
primary human hepatocytes via LNP at 22 nM (with
respect to the concentration of the sgRNA cargo)

| GUIDE | Avg | Std Dev | Avg | Std Dev | Avg | Std Dev | |
|---|---|---|---|---|---|---|---|
| ID | % Edit | % Edit | % Ins | % Ins | % Del | % Del | EC50 |
| G012089 | 69.10 | 4.95 | 22.65 | 3.04 | 46.50 | 1.98 | 90.93 |
| G012093 | 89.30 | 0.99 | 20.75 | 0.64 | 68.65 | 1.48 | 30.85 |
| G012095 | 76.75 | 2.19 | 8.70 | 0.14 | 68.20 | 2.40 | 71.83 |
| G012096 | 82.00 | 2.55 | 1.90 | 0.42 | 80.10 | 2.12 | 53.27 |
| G012103 | 84.30 | 0.00 | 5.65 | 1.20 | 78.75 | 1.20 | 8.73 |
| G012111 | 67.80 | 2.83 | 32.95 | 2.62 | 34.90 | 0.14 | 63.84 |
| G012115 | 80.05 | 3.46 | 34.65 | 1.91 | 45.55 | 1.48 | 50.98 |
| G012120 | 74.15 | 1.91 | 5.20 | 1.27 | 69.00 | 0.71 | 48.93 |
| G012133 | 75.25 | 1.20 | 24.55 | 1.20 | 50.75 | 2.33 | 55.54 |
| G012136 | 86.50 | 0.71 | 1.45 | 0.07 | 85.10 | 0.85 | 18.54 |

[0434] Table 10 shows the average and standard deviation for % Edit, % Insertion (Ins), and 00 Deletion (Del) for the tested LDHA sgRNAs at 22 nM delivered with Spy Cas9 via LNP in primary_cynomolgus hepatocytes. These samples were generated in triplicate.

TABLE 10
LDHA editing data for sgRNAs/Cas9 mRNA delivered to
primary cynomolgus hepatocytes via LNP at 22 nM (with
respect to the concentration of the sgRNA cargo)

| GUIDE | Avg | Std Dev | Avg | Std Dev | Avg | Std Dev | |
|---|---|---|---|---|---|---|---|
| ID | % Edit | % Edit | % Ins | % Ins | % Del | % Del | EC50 |
| G012151 | 94.87 | 0.12 | 78.50 | 1.39 | 16.77 | 1.33 | 0.599 |
| G012155 | 96.93 | 0.23 | 7.17 | 0.15 | 90.83 | 0.31 | 0.255 |
| G012157 | 77.43 | 3.33 | 31.77 | 1.76 | 46.80 | 2.17 | 1.111 |
| G012159 | 87.73 | 1.02 | 20.47 | 3.37 | 67.93 | 3.11 | 0.950 |
| G012162 | 95.17 | 0.64 | 28.77 | 0.25 | 67.17 | 0.99 | 0.801 |
| G012164 | 78.80 | 0.17 | 10.17 | 0.31 | 69.10 | 0.20 | 0.637 |
| G012165 | 83.40 | 2.20 | 14.87 | 0.83 | 69.27 | 2.72 | 0.953 |
| G012166 | 97.47 | 0.38 | 82.00 | 2.07 | 16.03 | 2.15 | 0.250 |
| G012167 | 96.63 | 0.29 | 70.37 | 0.90 | 27.87 | 1.29 | 0.297 |
| G012169 | 95.13 | 1.29 | 19.77 | 2.15 | 75.97 | 1.06 | 0.438 |

[0435] Cross screening of Spy Cas9 mRNA and sgRNA in primary cynomolgus hepatocytes using lipofection. Modified sgRNAs targeting LDHA were tested on primary cynomolgus hepatocytes in a dose response assay. Lipofection samples were prepared as described in Example 1. Primary cynomolgus hepatocytes were plated as described in Example 1. Cells were incubated at 37° C., 500 CO₂ for 48 hours prior to lipofection. Lipofection samples were incubated in media containing 600 cynomolgus serum at 37° C. for 10 minutes. Post-incubation the lipofection samples were added to the cynomolgus hepatocytes in an 8 point 3-fold dose response curve starting at 53 nM sgRNA (n=2). The cells were lysed 96 hours post-treatment for NGS analysis as described in Example 1. The dose response curve data for the guide sequences is shown in FIGS. 12A-12C. The 00 editing at the 53 nM concentration is listed below in Table 11.

TABLE 11
LDHA editing data for sgRNAs delivered to primary cynomolgus
hepatocytes via lipofection at 53 nM sgRNA

| | | Std Dev | | | Std Dev | | | Std Dev | |
|---|---|---|---|---|---|---|---|---|---|
| | Chr12 | Chr12 | | Chr14 | Avg | | Chr17 | Chr17 | |
| | Avg | Avg | Chr12 | Avg | Chr14 | Chr14 | Avg | Avg | Chr17 |
| Guide ID | % Edit | % Edit | EC50 | % Edit | % Edit | EC50 | % Edit | % Edit | EC50 |
| G012113 | 60.0 | 8.9 | 5.1 | 61.5 | 16.5 | 5.9 | 70.1 | 6.6 | 4.6 |
| G015541 | 75.4 | 14.4 | 4.4 | NA | NA | NA | 85.4 | 8.7 | 4.0 |
| G015547 | 69.8 | 5.7 | 6.8 | 76.0 | 1.1 | 7.5 | 76.2 | 3.5 | 7.6 |
| G015561 | NA | NA | NA | 58.3 | 7.0 | 6.5 | 60.3 | 4.7 | 7.1 |
| G015571 | 52.3 | 9.1 | 14.7 | NA | NA | NA | 68.1 | 6.6 | 10.2 |
| G015587 | 70.8 | 8.5 | 9.2 | 78.0 | 9.2 | 9.3 | 80.3 | 8.1 | 8.7 |
| G015591 | 74.6 | 1.1 | 8.3 | 72.3 | 2.8 | 8.6 | 77.9 | 1.1 | 6.9 |
| G015594 | 51.3 | 3.5 | 6.8 | 67.2 | 6.6 | 6.1 | 70.2 | 5.4 | 6.7 |
| G015622 | 66.3 | 6.9 | 4.5 | 4.9 | 0.3 | 5.0 | NA | NA | NA |

### Example 3. Phenotypic Analysis

### Western Blot Analysis of Intracellular Lactate Dehydrogenase A

[0436] Lipid nanoparticle (LNP) formulations of modified sgRNAs targeting human LDHA were administered to primary human hepatocytes to generate samples for Western Blotting. The LNPs were formulated as described in Example 1. Primary human hepatocytes were plated as described in Example 1. Cells were incubated at 37° C., 5% CO₂ for 48 hours prior to treatment with LNPs. LNPs were incubated in media containing 6% cynomolgus serum at 37° C. for 10 minutes. Post-incubation the LNPs were added to the human hepatocytes at a concentration of 25 nM of sgRNA per sample. At 96 hours post-transfection, a portion of the cells were collected and processed for NGS sequencing as described in Example 1. The remaining cells were harvested twenty-one days post-transfection and whole cell extracts (WCEs) were prepared and subjected to analysis by Western Blot as described in Example 1.

[0437] The editing data for these cells is provided in Table 12.

TABLE 12
LDHA editing data for sgRNA delivered
to primary human hepatocytes

| GUIDE ID | Edit frequency in PHH |
|---|---|
| G012089 | 0.871 |
| G012093 | 0.961 |
| G012095 | 0.926 |
| G012096 | 0.93 |
| G012103 | 0.882 |
| G012111 | 0.886 |
| G012115 | 0.933 |
| G012120 | 0.895 |
| G012133 | 0.915 |
| G012136 | 0.895 |

[0438] WCEs were analyzed by Western Blot for reduction of LDHA protein. Full length LDHA protein has 332 amino acids and a predicted molecular weight of 36.6 kD. A band at this molecular weight was observed in the control lane (untreated cells) but not in any of the treated lanes (FIG. 4).

### Transcript Analysis of Lactate Dehydrogenase A

[0439] Select modified sgRNAs targetingLDHA were administered to primary human and cynomolgus hepatocytes by lipofection to generate samples for qPCR. The lipofection samples were formulated as described in Example 1. Primary hepatocytes were plated as described in Example 1. Cells were incubated at 37° C., 5 CO₂ for 48 hours prior to treatment with lipid packets. Lipofection samples were incubated in media containing 60 cynomolgus serum at 37° C. for 10 minutes. Post-incubation the lipid packets were added to the hepatocytes at multiples concentrations. At 96 hours post-lipofection, the cells were collected and processed for RNA as described in Example 1. Average LDHA transcript reduction in primary human and cynomolgus hepatocytes at 15 nM guide is contained within Table 13 below, with full dose-response data displayed in FIGS. 13A-13B.

TABLE 13
Average relatives LDHA reduction in primary human
and cynomolgus hepatocytes at 15 nM sgRNA

| | Primary Human | | Primary Cynomolgus | |
|---|---|---|---|---|
| | Hepatocytes | | Hepatocytes | |
| | | Std Dev Avg | | Std Dev Avg |
| | Avg Relative | Relative | Avg Relative | Relative |
| | Reduction in | Reduction in | Reduction in | Reduction in |
| | LDHA | LDHA | LDHA | LDHA |
| GuideID | Expression | Expression | Expression | Expression |
| G012113 | 0.55 | 0.03 | 0.82 | 0 |
| G012115 | 0.76 | 0.01 | 0.88 | 0.01 |
| G012120 | 0.73 | 0 | 0.72 | 0.03 |
| G012133 | 0.61 | 0.01 | 0.55 | 0.03 |
| G015541 | 0.7 | 0.01 | 0.88 | 0.03 |
| G015547 | NA | NA | 0.79 | 0.02 |
| G015561 | 0.56 | 0.01 | 0.85 | 0.01 |
| G015622 | NA | NA | 0.82 | 0.01 |

### Example 4. In Vivo Editing of Ldha in a Mouse Model of PH1

[0440] Both wildtype and AGT-deficient mice (Agxt1^{-/-}), e.g., null mutant mice lacking liver AGXT mRNA and protein were used in this study. The AGT-deficient mice exhibit hyperoxaluria and crystalluria and thus represent a phenotypic model of PH1, as previously described by Salido et al., Proc Natl Acad Sci USA. 2006 Nov. 28; 103(48):18249-54. The wildtype mice were used to determine which formulation to test in the AGT-deficient mice.

[0441] Prior to formulating LNPs, RNPs comprising dgRNAs targeting murine Ldha were screened for editing efficiency similarly as described in Example 2 for the human and cyno LDHA-targeting gRNAs. Having identified active gRNAs from the dgRNA screen, a smaller set of modified sgRNAs based on these gRNAs were synthesized for further evaluation in vivo.

[0442] Animals were weighed and grouped according to body weight for preparing dosing solutions based on group average weight. LNPs containing modified sgRNAs targeting murine Ldha (see Table 14 below) were dosed via the lateral tail vein in a volume of 0.2 mL per animal (approximately 10 mL per kilogram body weight). The LNPs were formulated as described in Example 1. One week post-treatment, wildtype mice were euthanized and liver tissue was collected for DNA extraction and analysis of editing of murine Ldha. As shown in Table 14 below, dose-dependent levels of editing were observed in treated mice.

TABLE 14
LDHA editing data for sgRNAs
targeting murine Ldha

| | sgRNA Sequence | | | | |
|---|---|---|---|---|---|
| | (* = PS linkage; | Dose | | | |
| | ‘m’ = 2′-O-Me | (mpk, total | Avg % | Std Dev | |
| Guide ID | nucleotide) | RNA cargo) | Edit | % Edit | n |
| G009438 | mG*mU*mU*CACGCGCUGAG | 0.3 | 19.20 | 7.01 | 5 |
| | CUGUCAGUUUUAGAmGmCmU | 1 | 59.08 | 9.83 | 5 |
| | mAmGmAmAmAmUmAmGmCAA | 3 | 74.54 | 0.74 | 5 |
| | GUUAAAAUAAGGCUAGUCCG | | | | |
| | UUAUCAmAmCmUmUmGmAmA | | | | |
| | mAmAmAmGmUmGmGmCmAmC | | | | |
| | mCmGmAmGmUmCmGmGmUmG | | | | |
| | mCmU*mU*mU*mU (SEQ | | | | |
| | ID NO: 86) | | | | |
| G009439 | mG*mG*mG*GGCCCGUCAGC | 0.3 | 9.40 | 2.75 | 5 |
| | AAGAGGGUUUUAGAmGmCmU | 1 | 37.56 | 9.30 | 5 |
| | mAmGmAmAmAmUmAmGmCAA | 3 | 65.94 | 5.37 | 5 |
| | GUUAAAAUAAGGCUAGUCCG | | | | |
| | UUAUCAmAmCmUmUmGmAmA | | | | |
| | mAmAmAmGmUmGmGmCmAmC | | | | |
| | mCmGmAmGmUmCmGmGmUmG | | | | |
| | mCmU*mU*mU*mU (SEQ | | | | |
| | ID NO: 87) | | | | |
| G009442 | mG*mU*mU*GCAAUCUGGAU | 0.3 | 15.90 | 1.74 | 5 |
| | UCAGCGGUUUUAGAmGmCmU | 1 | 49.98 | 7.41 | 5 |
| | mAmGmAmAmAmUmAmGmCAA | 3 | 68.40 | 3.85 | 5 |
| | GUUAAAAUAAGGCUAGUCCG | | | | |
| | UUAUCAmAmCmUmUmGmAmA | | | | |
| | mAmAmAmGmUmGmGmCmAmC | | | | |
| | mCmGmAmGmUmCmGmGmUmG | | | | |
| | mCmU*mU*mU*mU (SEQ | | | | |
| | ID NO: 88) | | | | |
| G009445 | mG*mU*mC*AUGGAAGACAA | 0.3 | 12.40 | 4.60 | 5 |
| | ACUCAAGUUUUAGAmGmCmU | 1 | 47.62 | 10.11 | 5 |
| | mAmGmAmAmAmUmAmGmCAA | 3 | 62.10 | 4.06 | 5 |
| | GUUAAAAUAAGGCUAGUCCG | | | | |
| | UUAUCAmAmCmUmUmGmAmA | | | | |
| | mAmAmAmGmUmGmGmCmAmC | | | | |
| | mCmGmAmGmUmCmGmGmUmG | | | | |
| | mCmU*mU*mU*mU (SEQ | | | | |
| | ID NO: 89) | | | | |
| G009447 | mA*mC*mU*GGGCACUGACG | 0.3 | 9.48 | 4.78 | 5 |
| | CAGACAGUUUUAGAmGmCmU | 1 | 40.88 | 11.07 | 5 |
| | mAmGmAmAmAmUmAmGmCAA | 3 | 66.10 | 4.69 | 5 |
| | GUUAAAAUAAGGCUAGUCCG | | | | |
| | UUAUCAmAmCmUmUmGmAmA | | | | |
| | mAmAmAmGmUmGmGmCmAmC | | | | |
| | mCmGmAmGmUmCmGmGmUmG | | | | |
| | mCmU*mU*mU*mU (SEQ | | | | |
| | ID NO: 90) | | | | |

[0443] Having established the LNPs could edit the mouse Ldha gene in vivo, LNP containing G009439 was administered to the AGT-deficient mice in a dose response (0, 0.25, 0.5, 1, and 2 mpk) with respect to total mRNA cargo. These mice were housed in metabolic cages and urine was collected at various time points for oxalate levels, e.g., as described by Liebow et al., J Am Soc Nephrol. 2017 February; 28(2):494-503. Editing of the Ldha gene and secretion of oxalate were shown to increase and decrease, respectively, with increasing doses of LNP. The % editing and ug urinary oxalate/mg creatinine excreted are contained within Table 15 below and displayed in FIGS. 14A-14C.

TABLE 15
The % editing and ug urinary oxalate/mg creatinine
excreted after administration of LNP containing
G009439 to the AGT-deficient mice.

| | | | | Avg ug | Std Dev Avg | |
|---|---|---|---|---|---|---|
| | | Avg | Std Dev | Urinary | Urinary | |
| | | Editing | Avg | Oxalate/mg | Oxalate/mg | |
| Treatment | | % | Editing % | Creatinine | Creatinine | n |
| TSS | | 0.0 | 0.0 | 357.3 | 63.4 | 3 |
| 0.25 | mpk Ldha | 28.7 | 10.7 | 287.2 | 45.0 | 3 |
| 0.5 | mpk Ldha | 62.5 | 2.0 | 176.4 | 4.9 | 3 |
| 1 | mpk Ldha | 81.6 | 3.8 | 117.3 | 13.4 | 3 |
| 2 | mpk Ldha | 85.5 | 0.2 | 122.2 | 11.5 | 2 |

[0444] After establishing LNPs could reduce oxalate secretion in vivo, LNP containing G009439 was administered to the AGT-deficient mice at a dose of 2 mpk with respect to total mRNA cargo (n=4). As shown in FIG. 5, urine oxalate levels were reduced one week following treatment and this level of reduction was sustained out to at least 5 weeks post-dose at which point the study was terminated. No reduction was observed in control (PBS injected) animals (n=4). The percent editing in each treated animal is reported in Table 16, and the % reduction of urinary oxalate is shown at each week post-treatment in Table 18.

[0445] In the same study, AGT-deficient mice were also dosed with LNP (at a dose of 2 mpk (n=4)) containing a sgRNA (G000723) which targets murine Haol. As also shown in FIG. 5 and Table 17, oxalate levels were reduced one week following treatment with LNP comprising this gRNA and this level of reduction was sustained out to at least 5 weeks post-dose.

G000723:
(SEQ ID NO: 85)
mC*mA*mC*GUGAGCCAUGCACUGCAGUUUUAGAmGmCmUmAmGmAmAmA
mUmAmGmCAAGUUAAAAUAAGGCUAGUCCGUUAUCAmAmCmUmUmGmAmA
mAmAmAmGmUmGmGmCmAmCmCmGmAmGmUmCmGmGmUmGmCmU*mU*mU
*mU * = PS linkage; ‘m’ = 2′-O-Me nucleotide

TABLE 16
Editing results from AGXT −/− mice treated with LNP
comprising LDHA targeting gRNA (G009439) at 2 mpk

| Mouse # | % Edit | % Insertion | % Deletion |
|---|---|---|---|
| 1 | 90.8 | 1.1 | 89.7 |
| 2 | 86.1 | 1.3 | 84.8 |
| 3 | 90.5 | 1.1 | 89.4 |
| 4 | 90.3 | 1.2 | 89.2 |

TABLE 17
Editing results from AGXT −/− mice treated with LNP
comprising HAO1 targeting gRNA (G000723) at 2 mpk

| Mouse # | % Edit | % Insertion | % Deletion |
|---|---|---|---|
| 1 | 71.1 | 47.7 | 23.4 |
| 2 | 83.1 | 56 | 27.1 |
| 3 | 81.5 | 52.8 | 28.7 |
| 4 | 83.7 | 54.9 | 28.8 |

TABLE 18
Average oxalate levels and % reduction from baseline in
AGXT −/− mice treated with LNP comprising LDHA targeting
gRNA (G009439) at 2 mpk (of total RNA cargo) over 5 weeks. N = 4

| Collection | Avg ug Oxalate/mg | Avg % Reduction ug |
|---|---|---|
| date | creatinine | Oxalate/mg creatinine |
| Baseline | 407 | 0.00 |
| Week 1 | 272 | 33.18 |
| Week 2 | 182 | 55.25 |
| Week 3 | 168 | 58.59 |
| Week 4 | 146 | 64.11 |
| Week 5 | 142 | 65.11 |

[0446] Having demonstrated sustained urine oxalate reduction in AGT-deficient mice up to 5 weeks after LNP treatment, an additional study was conducted to track urine oxalate up to 15 weeks post-dose. LNP containing G009439 was administered to AGT-deficient mice at doses of 0.3 mpk (n=4) and 1 mpk (n=4). These mice were housed in metabolic cages and urine was collected at various time points for oxalate levels, as described above. Table 19 shows the editing results for the AGT-deficient mice. The average % editing achieved at 0.3 mpk dose was 33.42, std. dev. 11.95. The average % editing achieved at 1 mpk dose was 75.68, std. dev. 7.35. As shown in FIG. 6, urine oxalate levels were reduced following treatment and this level of reduction was sustained to 15 weeks post-dose at which point the study was terminated. The data depicted in FIG. 6 are shown in Table 20. No reduction was observed (data not shown) in control (PBS injected) animals (n=3).

[0447] Liver samples from the treated mice were processed and run on Western Blots as described in Example 1. Percent reduction of LDHA protein was calculated using the Licor Odyssey Image Studio Ver 5.2 software. GAPDH was used as a loading control and probed simultaneously with LDHA. A ratio was calculated for the densitometry values for GAPDH within each sample compared to the total region encompassing the band for LDHA. Percent reduction of LDHA protein was determined after the ratios were normalized to negative control lanes. Results are shown in Table 19 and depicted in FIG. 7.

[0448] LDHA protein in treated and nontreated mice was additionally characterized through immunohistochemical staining as described in Example 1 and depicted in FIG. 8. A progressive reduction in LDHA staining was observed in 0.3 mpk-dosed mice and 1mpk-dosed mice compared to control mice. FIG. 9 shows a correlation with an R² value of 0.95 between the editing and protein levels in Table 19.

TABLE 19
Agxt1−/− Mouse Model Editing and Protein Data, 15 Week Study

| | | | | | LDHA Protein |
|---|---|---|---|---|---|
| | | | | | remaining |
| | mpk | % | % | % | (relative to |
| Mouse # | G009439 | Edit | Insertion | Deletion | negative control) |
| 1 | 0.3 | 27.2 | 0.3 | 26.9 | 0.67 |
| 2 | 0.3 | 37.2 | 0.5 | 36.7 | 0.47 |
| 3 | 0.3 | 48.3 | 0.7 | 47.7 | 0.53 |
| 4 | 0.3 | 21.0 | 0.5 | 20.6 | 0.71 |
| 5 | 1 | 81.6 | 1.2 | 80.5 | 0.13 |
| 6 | 1 | 72.0 | 1.0 | 71.1 | 0.11 |
| 7 | 1 | 67.1 | 0.8 | 66.3 | 0.22 |
| 8 | 1 | 82.0 | 1.2 | 80.8 | 0.21 |

TABLE 20
Agxt1−/− Mouse Model Average Urine
Oxalate (n = 4 for each dose)

| | Dose G009439 | Avg Urine Oxalate | Std Dev Avg |
|---|---|---|---|
| Week | (mpk) | (mg/g creatinine/24 hr) | Urine Oxalate |
| 0 | TSS | 377.47 | 58.22 |
| 5 | TSS | 413.72 | 77.33 |
| 9 | TSS | 354.77 | 43.75 |
| 15 | TSS | 345.95 | 88.18 |
| 0 | 0.3 | 352.09 | 39.77 |
| 5 | 0.3 | 304.78 | 68.34 |
| 9 | 0.3 | 255.69 | 53.17 |
| 15 | 0.3 | 270.24 | 37.08 |
| 0 | 1.0 | 390.46 | 68.06 |
| 5 | 1.0 | 123.26 | 8.94 |
| 9 | 1.0 | 174.33 | 25.01 |
| 15 | 1.0 | 145.91 | 15.46 |

[0449] Liver and muscle samples from the treated mice were processed for LDH activity as described in Example 1. Reduction of LDH activity was observed in liver samples from mice treated with 1mpk of Ldha LNP. Specific activity (mol/min/mg protein) from the treated and control mice are contained in Table 21 below and data displayed in FIGS. 15A-15B.

TABLE 21
Liver and muscle specific LDH activity

| | | Std Dev Avg | | Std Dev Avg | |
|---|---|---|---|---|---|
| | Avg Specific | Specific | Avg Specific | Specific | |
| | Activity | Activity | Activity | Activity | |
| | (μmol/min/mg | (μmol/min/mg | (μmol/min/mg | (μmol/min/mg | |
| | protein) - | protein) - | protein) - | protein) - | |
| Treatment | Liver | Liver | Muscle | Muscle | n |
| TSS | 0.8 | 0.1 | 1.9 | 0.2 | 3.0 |
| Neg. Ctrl. Guide | 0.8 | 0.1 | 1.8 | 0.2 | 3.0 |
| 0.3 mpk Ldha Guide | 0.7 | 0.2 | 1.6 | 0.5 | 4.0 |
| 1 mpk Ldha Guide | 0.2 | 0.1 | 1.8 | 0.1 | 4.0 |

[0450] Liver and plasma samples from the treated mice were also analyzed for pyruvate, as described in Example 1. Pyruvate is a metabolite converted to lactate by lactate dehydrogenase (Urbanska K et al, nt Mol Sci. 2019 Apr. 27; 20(9)). Pyruvate concentrations proved to be elevated in liver samples from 1mpk-treated mice, but little differences in plasma pyruvate concentrations were observed between treated and control mice. These data are contained in Table 22 and shown in FIGS. 16A-16B.

TABLE 22
Liver and plasma pyruvate quantification

| | Avg Liver | Std Dev Avg | | Std Dev Avg | |
|---|---|---|---|---|---|
| | Pyruvate | Liver Pyruvate | Avg Plasma | Plasma | |
| | (nmols/g | (nmols/g | Pyruvate | Pyruvate | |
| Treatment | tissue) | tissue) | (μM) | (μM) | n |
| TSS | 17.40 | 1.76 | 41.64 | 14.29 | 3 |
| Neg. Ctrl. Guide | 25.12 | 8.17 | 48.76 | 16.47 | 3 |
| 0.3 mpk Ldha Guide | 19.11 | 3.58 | 71.64 | 10.20 | 4 |
| 1 mpk Ldha Guide | 85.46 | 35.30 | 61.32 | 33.82 | 4 |

[0451] Having demonstrated sustained urine oxalate reduction in AGT-deficient mice up to 15 weeks after LNP treatment, an additional study was conducted to determine the ability of mice with compromised kidney function to clear lactate after LDHA knockdown. C51B16 male mice that had undergone either 5/6 nephrectomy or sham surgeries were obtained from the Jackson Laboratory (Bar Harbor, ME). One-week post-surgery, animals were bled for baseline lactate levels as described in Example 1. Animals were then dosed with LNP containing G009439 at a dose of 2mpk (n=6). Two weeks post-dose, animals were given a lactate challenge comprising of 2 g/kg of sodium lactate dissolved in phosphate buffered saline (concentration 200 mg/mL, ˜18 mM) pH 7.4, delivered intraperitoneally. Animals were tail-bled before the challenge and then 15, 30, 60, and 180 minutes post-challenge. Blood samples were analyzed for lactate levels as described in Example 1. No significant differences in lactate clearance were observed in mice that had received the nephrectomy surgeries and LDHA LNP, compared to sham surgery and vehicle treatment mice. Table 23 below details the average plasma pyruvate across animal groups, as also shown in FIG. 17.

TABLE 23
Nephrectomy study plasma lactate clearance

| | Sham Surgery - | | Sham Surgery - | | 5/6 Nephrectomy - | | 5/6 Nephrectomy - | |
|---|---|---|---|---|---|---|---|---|
| | TSS Vehicle Ctrl | | Ldha 1 mpk | | TSS Vehicle Ctrl | | Ldha 1 mpk | |
| | (n = 5) | | (n = 6) | | (n = 5) | | (n = 5) | |
| | | Std Dev | | Std Dev | | Std Dev | | Std Dev |
| | Avg | Avg | Avg | Avg | Avg | Avg | Avg | Avg |
| | Plasma | Plasma | Plasma | Plasma | Plasma | Plasma | Plasma | Plasma |
| Time | Lactate | Lactate | Lactate | Lactate | Lactate | Lactate | Lactate | Lactate |
| (min) | (mM) | (mM) | (mM) | (mM) | (mM) | (mM) | (mM) | (mM) |
| 0 | 7.2 | 2.9 | 5.9 | 2.0 | 9.0 | 2.3 | 6.5 | 2.8 |
| 15 | 24.5 | 10.3 | 23.3 | 4.6 | 24.2 | 8.1 | 21.7 | 9.1 |
| 30 | 20.4 | 8.2 | 17.2 | 3.7 | 18.7 | 4.3 | 18.1 | 7.7 |
| 60 | 11.7 | 4.9 | 9.4 | 3.1 | 12.2 | 4.5 | 11.1 | 4.7 |
| 180 | 6.6 | 2.6 | 6.3 | 2.9 | 8.4 | 2.7 | 5.5 | 2.8 |

1.-8. (canceled)

9. A composition comprising:
a) a guide RNA comprising
i) the guide sequence CCUAUCAUACAGUGCUUAUG (SEQ ID NO: 5); or
ii) at least 17 contiguous nucleotides of the guide sequence CCUAUCAUACAGUGCUUAUG (SEQ ID NO: 5); or
iii) a guide sequence that is at least 95% or 90% identical to CCUAUCAUACAGUGCUUAUG (SEQ ID NO: 5); or
iv) a guide sequence comprising the sequence

| (SEQ ID NO: 5) | |
|---|---|
| | CCUAUCAUACAGUGCUUAUG |

10.-216. (canceled)

217. The composition of claim 9, wherein the guide RNA is formulated in a lipid nanoparticle (LNP).

218. The composition of claim 9, wherein the composition further comprises an RNA-guided DNA binding agent or an mRNA that encodes an RNA-guided DNA binding agent.

219. The composition of claim 218, wherein the RNA-guided DNA binding agent is a Cas9.

220. The composition of claim 9, wherein the composition comprises a single guide RNA (sgRNA) comprising in 5′ to 3′ order:
1) the guide sequence; and
2) the nucleotide sequence
(SEQ ID NO: 201)
GUUUUAGAGCUAGAAAUAGCAAGUUAAAAUAAGGCUAGUCCGUUAUCAAC
UUGAAAAAGUGGCACCGAGUCGGUGCUUUU.

221. The composition of claim 220, wherein the sgRNA comprises (1) a 5′ end modification; (2) a 3′ end modification; or (3) a 5′ end modification and a 3′ end modification.

222. The composition of claim 221, wherein the composition further comprises an RNA-guided DNA binding agent or an mRNA that encodes an RNA-guided DNA binding agent.

223. The composition of claim 222, wherein the RNA-guided DNA binding agent is a Cas9.

224. The composition of claim 9, wherein the composition comprises a single guide RNA (sgRNA) comprising in 5′ to 3′ order:
1) the guide sequence; and
2) the nucleotide sequence GUUUUAGAmGmCmUmAmGmAmAmAmUmAmGmCAAGUUAAAAUAAGGCUA GUCCGUUAUCAmAmCmUmUmGmAmAmAmAmAmGmUmGmGmCmAmCmCm GmAmGmUmCmGmGmUmGmCmU*mU*mU*mU (SEQ ID NO: 405), wherein a lower case “m” indicates that the nucleotide is 2′-O-Me modified and a * denotes a phosphorothioate (PS) linkage.

The application's sequence listing, which the Patent Office published only in electronic form, follows.

SEQUENCE LISTING (2082 sequences)

SEQ ID NO: 1 - RNA, 20 nt, synthetic construct
  misc_feature 1..20: note = Synthetic
  source 1..20: mol_type = other RNA
acatagacctaccttaatca

SEQ ID NO: 2 - RNA, 20 nt, synthetic construct
  misc_feature 1..20: note = Synthetic
  source 1..20: mol_type = other RNA
aaataacttatgcttaccac

SEQ ID NO: 3 - RNA, 20 nt, synthetic construct
  misc_feature 1..20: note = Synthetic
  source 1..20: mol_type = other RNA
atgcagtcaaaagcctcacc

SEQ ID NO: 4 - RNA, 20 nt, synthetic construct
  misc_feature 1..20: note = Synthetic
  source 1..20: mol_type = other RNA
tcagggtctttacggaataa

SEQ ID NO: 5 - RNA, 20 nt, synthetic construct
  misc_feature 1..20: note = Synthetic
  source 1..20: mol_type = other RNA
cctatcatacagtgcttatg

SEQ ID NO: 6 - RNA, 20 nt, synthetic construct
  misc_feature 1..20: note = Synthetic
  source 1..20: mol_type = other RNA
ccgattccgttacctaatgg

SEQ ID NO: 7 - RNA, 20 nt, synthetic construct
  misc_feature 1..20: note = Synthetic
  source 1..20: mol_type = other RNA
tagacctaccttaatcatgg

SEQ ID NO: 8 - RNA, 20 nt, synthetic construct
  misc_feature 1..20: note = Synthetic
  source 1..20: mol_type = other RNA
tacagagagtccaatagccc

SEQ ID NO: 9 - RNA, 20 nt, synthetic construct
  misc_feature 1..20: note = Synthetic
  source 1..20: mol_type = other RNA
cttttagtgcctgtatggag

SEQ ID NO: 10 - RNA, 20 nt, synthetic construct
  misc_feature 1..20: note = Synthetic
  source 1..20: mol_type = other RNA
cccgattccgttacctaatg

SEQ ID NO: 11 - RNA, 20 nt, synthetic construct
  misc_feature 1..20: note = Synthetic
  source 1..20: mol_type = other RNA
ggctggggcacgtcagcaag

SEQ ID NO: 12 - RNA, 20 nt, synthetic construct
  misc_feature 1..20: note = Synthetic
  source 1..20: mol_type = other RNA
ccccattaggtaacggaatc

SEQ ID NO: 13 - RNA, 20 nt, synthetic construct
  misc_feature 1..20: note = Synthetic
  source 1..20: mol_type = other RNA
aagctggtcattatcacggc

SEQ ID NO: 14 - RNA, 20 nt, synthetic construct
  misc_feature 1..20: note = Synthetic
  source 1..20: mol_type = other RNA
tacactttgggggatccaaa

SEQ ID NO: 15 - RNA, 20 nt, synthetic construct
  misc_feature 1..20: note = Synthetic
  source 1..20: mol_type = other RNA
atttgatgtcttttaggact

SEQ ID NO: 16 - RNA, 20 nt, synthetic construct
  misc_feature 1..20: note = Synthetic
  source 1..20: mol_type = other RNA
ctccaagctggtcattatca

SEQ ID NO: 17 - RNA, 20 nt, synthetic construct
  misc_feature 1..20: note = Synthetic
  source 1..20: mol_type = other RNA
gtccaatatggcaactctaa

SEQ ID NO: 18 - RNA, 20 nt, synthetic construct
  misc_feature 1..20: note = Synthetic
  source 1..20: mol_type = other RNA
ggctacacatcctgggctat

SEQ ID NO: 19 - RNA, 20 nt, synthetic construct
  misc_feature 1..20: note = Synthetic
  source 1..20: mol_type = other RNA
taccttcattaagatactga

SEQ ID NO: 20 - RNA, 20 nt, synthetic construct
  misc_feature 1..20: note = Synthetic
  source 1..20: mol_type = other RNA
agcccgattccgttacctaa

SEQ ID NO: 21 - RNA, 20 nt, synthetic construct
  misc_feature 1..20: note = Synthetic
  source 1..20: mol_type = other RNA
gcctttcccccattaggtaa

SEQ ID NO: 22 - RNA, 20 nt, synthetic construct
  misc_feature 1..20: note = Synthetic
  source 1..20: mol_type = other RNA
tacgctggaccaaattaaga

SEQ ID NO: 23 - RNA, 20 nt, synthetic construct
  misc_feature 1..20: note = Synthetic
  source 1..20: mol_type = other RNA
tatttcttttagtgcctgta

SEQ ID NO: 24 - RNA, 20 nt, synthetic construct
  misc_feature 1..20: note = Synthetic
  source 1..20: mol_type = other RNA
agctggtcattatcacggct

SEQ ID NO: 25 - RNA, 20 nt, synthetic construct
  misc_feature 1..20: note = Synthetic
  source 1..20: mol_type = other RNA
gctggtcattatcacggctg

SEQ ID NO: 26 - RNA, 20 nt, synthetic construct
  misc_feature 1..20: note = Synthetic
  source 1..20: mol_type = other RNA
gctggggcacgtcagcaaga

SEQ ID NO: 27 - RNA, 20 nt, synthetic construct
  misc_feature 1..20: note = Synthetic
  source 1..20: mol_type = other RNA
ctttatcagtccctaaatct

SEQ ID NO: 28 - RNA, 20 nt, synthetic construct
  misc_feature 1..20: note = Synthetic
  source 1..20: mol_type = other RNA
gcccgattccgttacctaat

SEQ ID NO: 29 - RNA, 20 nt, synthetic construct
  misc_feature 1..20: note = Synthetic
  source 1..20: mol_type = other RNA
tttcatcttcagggtcttta

SEQ ID NO: 30 - RNA, 20 nt, synthetic construct
  misc_feature 1..20: note = Synthetic
  source 1..20: mol_type = other RNA
acaactgtaatcttattctg

SEQ ID NO: 31 - RNA, 20 nt, synthetic construct
  misc_feature 1..20: note = Synthetic
  source 1..20: mol_type = other RNA
cattaagatactgatggcac

SEQ ID NO: 32 - RNA, 20 nt, synthetic construct
  misc_feature 1..20: note = Synthetic
  source 1..20: mol_type = other RNA
tttagggactgataaagata

SEQ ID NO: 33 - RNA, 20 nt, synthetic construct
  misc_feature 1..20: note = Synthetic
  source 1..20: mol_type = other RNA
ctgataaagataaggaacag

SEQ ID NO: 34 - RNA, 20 nt, synthetic construct
  misc_feature 1..20: note = Synthetic
  source 1..20: mol_type = other RNA
ttacctaatgggggaaaggc

SEQ ID NO: 35 - RNA, 20 nt, synthetic construct
  misc_feature 1..20: note = Synthetic
  source 1..20: mol_type = other RNA
tggagtggaatgaatgttgc

SEQ ID NO: 36 - RNA, 20 nt, synthetic construct
  misc_feature 1..20: note = Synthetic
  source 1..20: mol_type = other RNA
tctttatcagtccctaaatc

SEQ ID NO: 37 - RNA, 20 nt, synthetic construct
  misc_feature 1..20: note = Synthetic
  source 1..20: mol_type = other RNA
tccgttacctaatgggggaa

SEQ ID NO: 38 - RNA, 20 nt, synthetic construct
  misc_feature 1..20: note = Synthetic
  source 1..20: mol_type = other RNA
tatctgcactcttcttcaaa

SEQ ID NO: 39 - RNA, 20 nt, synthetic construct
  misc_feature 1..20: note = Synthetic
  source 1..20: mol_type = other RNA
tacctaatgggggaaaggct

SEQ ID NO: 40 - RNA, 20 nt, synthetic construct
  misc_feature 1..20: note = Synthetic
  source 1..20: mol_type = other RNA
agccgtgataatgaccagct

SEQ ID NO: 41 - RNA, 20 nt, synthetic construct
  misc_feature 1..20: note = Synthetic
  source 1..20: mol_type = other RNA
cccccattaggtaacggaat

SEQ ID NO: 42 - RNA, 20 nt, synthetic construct
  misc_feature 1..20: note = Synthetic
  source 1..20: mol_type = other RNA
tttaaaattgcagctccttt

SEQ ID NO: 43 - RNA, 20 nt, synthetic construct
  misc_feature 1..20: note = Synthetic
  source 1..20: mol_type = other RNA
gctgatttataatcttctaa

SEQ ID NO: 44 - RNA, 20 nt, synthetic construct
  misc_feature 1..20: note = Synthetic
  source 1..20: mol_type = other RNA
acattcattccactccatac

SEQ ID NO: 45 - RNA, 20 nt, synthetic construct
  misc_feature 1..20: note = Synthetic
  source 1..20: mol_type = other RNA
ccttaatcatggtggaaact

SEQ ID NO: 46 - RNA, 20 nt, synthetic construct
  misc_feature 1..20: note = Synthetic
  source 1..20: mol_type = other RNA
accttaatcatggtggaaac

SEQ ID NO: 47 - RNA, 20 nt, synthetic construct
  misc_feature 1..20: note = Synthetic
  source 1..20: mol_type = other RNA
cctttgccagagacaatctt

SEQ ID NO: 48 - RNA, 20 nt, synthetic construct
  misc_feature 1..20: note = Synthetic
  source 1..20: mol_type = other RNA
gaaggtgactctgacttctg

SEQ ID NO: 49 - RNA, 20 nt, synthetic construct
  misc_feature 1..20: note = Synthetic
  source 1..20: mol_type = other RNA
tattggaagcggttgcaatc

SEQ ID NO: 50 - RNA, 20 nt, synthetic construct
  misc_feature 1..20: note = Synthetic
  source 1..20: mol_type = other RNA
aagtcagagtcaccttcaca

SEQ ID NO: 51 - RNA, 20 nt, synthetic construct
  misc_feature 1..20: note = Synthetic
  source 1..20: mol_type = other RNA
gactctgacttctgaggaag

SEQ ID NO: 52 - RNA, 20 nt, synthetic construct
  misc_feature 1..20: note = Synthetic
  source 1..20: mol_type = other RNA
tgcaaccgcttccaataaca

SEQ ID NO: 53 - RNA, 20 nt, synthetic construct
  misc_feature 1..20: note = Synthetic
  source 1..20: mol_type = other RNA
tattttctcctttttcatag

SEQ ID NO: 54 - RNA, 20 nt, synthetic construct
  misc_feature 1..20: note = Synthetic
  source 1..20: mol_type = other RNA
tttttttcatttcatcttca

SEQ ID NO: 55 - RNA, 20 nt, synthetic construct
  misc_feature 1..20: note = Synthetic
  source 1..20: mol_type = other RNA
accaaagtagtcactgttca

SEQ ID NO: 56 - RNA, 20 nt, synthetic construct
  misc_feature 1..20: note = Synthetic
  source 1..20: mol_type = other RNA
acgcagttaaaaggctcacc

SEQ ID NO: 57 - RNA, 20 nt, synthetic construct
  misc_feature 1..20: note = Synthetic
  source 1..20: mol_type = other RNA
ttgcttattgtttcaaatcc

SEQ ID NO: 58 - RNA, 20 nt, synthetic construct
  misc_feature 1..20: note = Synthetic
  source 1..20: mol_type = other RNA
ttccccctatagattccttc

SEQ ID NO: 59 - RNA, 20 nt, synthetic construct
  misc_feature 1..20: note = Synthetic
  source 1..20: mol_type = other RNA
tcgagctttgtggcagttag

SEQ ID NO: 60 - RNA, 20 nt, synthetic construct
  misc_feature 1..20: note = Synthetic
  source 1..20: mol_type = other RNA
ttggggttaataaaccgcga

SEQ ID NO: 61 - RNA, 20 nt, synthetic construct
  misc_feature 1..20: note = Synthetic
  source 1..20: mol_type = other RNA
tgaaggcccataccttagcg

SEQ ID NO: 62 - RNA, 20 nt, synthetic construct
  misc_feature 1..20: note = Synthetic
  source 1..20: mol_type = other RNA
cggtttattaaccccaagtg

SEQ ID NO: 63 - RNA, 20 nt, synthetic construct
  misc_feature 1..20: note = Synthetic
  source 1..20: mol_type = other RNA
cccataccttagcgtggaaa

SEQ ID NO: 64 - RNA, 20 nt, synthetic construct
  misc_feature 1..20: note = Synthetic
  source 1..20: mol_type = other RNA
ggcttttctgcacgtacctc

SEQ ID NO: 65 - RNA, 20 nt, synthetic construct
  misc_feature 1..20: note = Synthetic
  source 1..20: mol_type = other RNA
gaaaaggaatatcgacgttt

SEQ ID NO: 66 - RNA, 20 nt, synthetic construct
  misc_feature 1..20: note = Synthetic
  source 1..20: mol_type = other RNA
accgcgatgggtgagccctc

SEQ ID NO: 67 - RNA, 20 nt, synthetic construct
  misc_feature 1..20: note = Synthetic
  source 1..20: mol_type = other RNA
gcggtttattaaccccaagt

SEQ ID NO: 68 - RNA, 20 nt, synthetic construct
  misc_feature 1..20: note = Synthetic
  source 1..20: mol_type = other RNA
accgcacgcttcagtgcctt

SEQ ID NO: 69 - RNA, 20 nt, synthetic construct
  misc_feature 1..20: note = Synthetic
  source 1..20: mol_type = other RNA
ggaaaaggaatatcgacgtt

SEQ ID NO: 70 - RNA, 20 nt, synthetic construct
  misc_feature 1..20: note = Synthetic
  source 1..20: mol_type = other RNA
gtgtaagtatagcctcctga

SEQ ID NO: 71 - RNA, 20 nt, synthetic construct
  misc_feature 1..20: note = Synthetic
  source 1..20: mol_type = other RNA
gatattccttttccacgcta

SEQ ID NO: 72 - RNA, 20 nt, synthetic construct
  misc_feature 1..20: note = Synthetic
  source 1..20: mol_type = other RNA
gcgatgggtgagccctcagg

SEQ ID NO: 73 - RNA, 20 nt, synthetic construct
  misc_feature 1..20: note = Synthetic
  source 1..20: mol_type = other RNA
ggaaaggccagccccacttg

SEQ ID NO: 74 - RNA, 20 nt, synthetic construct
  misc_feature 1..20: note = Synthetic
  source 1..20: mol_type = other RNA
caccgcacgcttcagtgcct

SEQ ID NO: 75 - RNA, 20 nt, synthetic construct
  misc_feature 1..20: note = Synthetic
  source 1..20: mol_type = other RNA
tgccacaaagctcgagccca

SEQ ID NO: 76 - RNA, 20 nt, synthetic construct
  misc_feature 1..20: note = Synthetic
  source 1..20: mol_type = other RNA
ggtgtaagtatagcctcctg

SEQ ID NO: 77 - RNA, 20 nt, synthetic construct
  misc_feature 1..20: note = Synthetic
  source 1..20: mol_type = other RNA
tcctgagggctcacccatcg

SEQ ID NO: 78 - RNA, 20 nt, synthetic construct
  misc_feature 1..20: note = Synthetic
  source 1..20: mol_type = other RNA
aggaaaggccagccccactt

SEQ ID NO: 79 - RNA, 20 nt, synthetic construct
  misc_feature 1..20: note = Synthetic
  source 1..20: mol_type = other RNA
ttattaaccccaagtggggc

SEQ ID NO: 80 - RNA, 20 nt, synthetic construct
  misc_feature 1..20: note = Synthetic
  source 1..20: mol_type = other RNA
gaggaaaggccagccccact

SEQ ID NO: 81 - RNA, 20 nt, synthetic construct
  misc_feature 1..20: note = Synthetic
  source 1..20: mol_type = other RNA
gctcaaagtgatcttgtctg

SEQ ID NO: 82 - RNA, 20 nt, synthetic construct
  misc_feature 1..20: note = Synthetic
  source 1..20: mol_type = other RNA
cctggctgtgtccttgctgt

SEQ ID NO: 83 - RNA, 20 nt, synthetic construct
  misc_feature 1..20: note = Synthetic
  source 1..20: mol_type = other RNA
cgcggtttattaaccccaag

SEQ ID NO: 84 - RNA, 20 nt, synthetic construct
  misc_feature 1..20: note = Synthetic
  source 1..20: mol_type = other RNA
tggggttaataaaccgcgat

SEQ ID NO: 85 - RNA, 100 nt, synthetic construct
  misc_feature 1..100: note = Synthetic
  modified_base 1: mod_base = OTHER; note = 2'-O-methyl nucleotide, phosphorothioate linkage
  modified_base 2: mod_base = OTHER; note = 2'-O-methyl nucleotide, phosphorothioate linkage
  modified_base 3: mod_base = OTHER; note = 2'-O-methyl nucleotide, phosphorothioate linkage
  modified_base 29: mod_base = OTHER; note = 2'-O-methyl nucleotide
  modified_base 30: mod_base = OTHER; note = 2'-O-methyl nucleotide
  modified_base 31: mod_base = OTHER; note = 2'-O-methyl nucleotide
  modified_base 32: mod_base = OTHER; note = 2'-O-methyl nucleotide
  modified_base 33: mod_base = OTHER; note = 2'-O-methyl nucleotide
  modified_base 34: mod_base = OTHER; note = 2'-O-methyl nucleotide
  modified_base 35: mod_base = OTHER; note = 2'-O-methyl nucleotide
  modified_base 36: mod_base = OTHER; note = 2'-O-methyl nucleotide
  modified_base 37: mod_base = OTHER; note = 2'-O-methyl nucleotide
  modified_base 38: mod_base = OTHER; note = 2'-O-methyl nucleotide
  modified_base 39: mod_base = OTHER; note = 2'-O-methyl nucleotide
  modified_base 40: mod_base = OTHER; note = 2'-O-methyl nucleotide
  modified_base 69: mod_base = OTHER; note = 2'-O-methyl nucleotide
  modified_base 70: mod_base = OTHER; note = 2'-O-methyl nucleotide
  modified_base 71: mod_base = OTHER; note = 2'-O-methyl nucleotide
  modified_base 72: mod_base = OTHER; note = 2'-O-methyl nucleotide
  modified_base 73: mod_base = OTHER; note = 2'-O-methyl nucleotide
  modified_base 74: mod_base = OTHER; note = 2'-O-methyl nucleotide
  modified_base 75: mod_base = OTHER; note = 2'-O-methyl nucleotide
  modified_base 76: mod_base = OTHER; note = 2'-O-methyl nucleotide
  modified_base 77: mod_base = OTHER; note = 2'-O-methyl nucleotide
  modified_base 78: mod_base = OTHER; note = 2'-O-methyl nucleotide
  modified_base 79: mod_base = OTHER; note = 2'-O-methyl nucleotide
  modified_base 80: mod_base = OTHER; note = 2'-O-methyl nucleotide
  modified_base 81: mod_base = OTHER; note = 2'-O-methyl nucleotide
  modified_base 82: mod_base = OTHER; note = 2'-O-methyl nucleotide
  modified_base 83: mod_base = OTHER; note = 2'-O-methyl nucleotide
  modified_base 84: mod_base = OTHER; note = 2'-O-methyl nucleotide
  modified_base 85: mod_base = OTHER; note = 2'-O-methyl nucleotide
  modified_base 86: mod_base = OTHER; note = 2'-O-methyl nucleotide
  modified_base 87: mod_base = OTHER; note = 2'-O-methyl nucleotide
  modified_base 88: mod_base = OTHER; note = 2'-O-methyl nucleotide
  modified_base 89: mod_base = OTHER; note = 2'-O-methyl nucleotide
  modified_base 90: mod_base = OTHER; note = 2'-O-methyl nucleotide
  modified_base 91: mod_base = OTHER; note = 2'-O-methyl nucleotide
  modified_base 92: mod_base = OTHER; note = 2'-O-methyl nucleotide
  modified_base 93: mod_base = OTHER; note = 2'-O-methyl nucleotide
  modified_base 94: mod_base = OTHER; note = 2'-O-methyl nucleotide
  modified_base 95: mod_base = OTHER; note = 2'-O-methyl nucleotide
  modified_base 96: mod_base = OTHER; note = 2'-O-methyl nucleotide
  modified_base 97: mod_base = OTHER; note = 2'-O-methyl nucleotide, phosphorothioate linkage
  modified_base 98: mod_base = OTHER; note = 2'-O-methyl nucleotide, phosphorothioate linkage
  modified_base 99: mod_base = OTHER; note = 2'-O-methyl nucleotide, phosphorothioate linkage
  modified_base 100: mod_base = OTHER; note = 2'-O-methyl nucleotide
  source 1..100: mol_type = other RNA
cacgtgagccatgcactgcagttttagagctagaaatagcaagttaaaataaggctagtccgttatcaacttgaaaaagtggcaccgagtcggtgctttt

SEQ ID NO: 86 - RNA, 100 nt, synthetic construct
  misc_feature 1..100: note = Synthetic
  modified_base 1: mod_base = OTHER; note = 2'-O-methyl nucleotide, phosphorothioate linkage
  modified_base 2: mod_base = OTHER; note = 2'-O-methyl nucleotide, phosphorothioate linkage
  modified_base 3: mod_base = OTHER; note = 2'-O-methyl nucleotide, phosphorothioate linkage
  modified_base 29: mod_base = OTHER; note = 2'-O-methyl nucleotide
  modified_base 30: mod_base = OTHER; note = 2'-O-methyl nucleotide
  modified_base 31: mod_base = OTHER; note = 2'-O-methyl nucleotide
  modified_base 32: mod_base = OTHER; note = 2'-O-methyl nucleotide
  modified_base 33: mod_base = OTHER; note = 2'-O-methyl nucleotide
  modified_base 34: mod_base = OTHER; note = 2'-O-methyl nucleotide
  modified_base 35: mod_base = OTHER; note = 2'-O-methyl nucleotide
  modified_base 36: mod_base = OTHER; note = 2'-O-methyl nucleotide
  modified_base 37: mod_base = OTHER; note = 2'-O-methyl nucleotide
  modified_base 38: mod_base = OTHER; note = 2'-O-methyl nucleotide
  modified_base 39: mod_base = OTHER; note = 2'-O-methyl nucleotide
  modified_base 40: mod_base = OTHER; note = 2'-O-methyl nucleotide
  modified_base 69: mod_base = OTHER; note = 2'-O-methyl nucleotide
  modified_base 70: mod_base = OTHER; note = 2'-O-methyl nucleotide
  modified_base 71: mod_base = OTHER; note = 2'-O-methyl nucleotide
  modified_base 72: mod_base = OTHER; note = 2'-O-methyl nucleotide
  modified_base 73: mod_base = OTHER; note = 2'-O-methyl nucleotide
  modified_base 74: mod_base = OTHER; note = 2'-O-methyl nucleotide
  modified_base 75: mod_base = OTHER; note = 2'-O-methyl nucleotide
  modified_base 76: mod_base = OTHER; note = 2'-O-methyl nucleotide
  modified_base 77: mod_base = OTHER; note = 2'-O-methyl nucleotide
  modified_base 78: mod_base = OTHER; note = 2'-O-methyl nucleotide
  modified_base 79: mod_base = OTHER; note = 2'-O-methyl nucleotide
  modified_base 80: mod_base = OTHER; note = 2'-O-methyl nucleotide
  modified_base 81: mod_base = OTHER; note = 2'-O-methyl nucleotide
  modified_base 82: mod_base = OTHER; note = 2'-O-methyl nucleotide
  modified_base 83: mod_base = OTHER; note = 2'-O-methyl nucleotide
  modified_base 84: mod_base = OTHER; note = 2'-O-methyl nucleotide
  modified_base 85: mod_base = OTHER; note = 2'-O-methyl nucleotide
  modified_base 86: mod_base = OTHER; note = 2'-O-methyl nucleotide
  modified_base 87: mod_base = OTHER; note = 2'-O-methyl nucleotide
  modified_base 88: mod_base = OTHER; note = 2'-O-methyl nucleotide
  modified_base 89: mod_base = OTHER; note = 2'-O-methyl nucleotide
  modified_base 90: mod_base = OTHER; note = 2'-O-methyl nucleotide
  modified_base 91: mod_base = OTHER; note = 2'-O-methyl nucleotide
  modified_base 92: mod_base = OTHER; note = 2'-O-methyl nucleotide
  modified_base 93: mod_base = OTHER; note = 2'-O-methyl nucleotide
  modified_base 94: mod_base = OTHER; note = 2'-O-methyl nucleotide
  modified_base 95: mod_base = OTHER; note = 2'-O-methyl nucleotide
  modified_base 96: mod_base = OTHER; note = 2'-O-methyl nucleotide
  modified_base 97: mod_base = OTHER; note = 2'-O-methyl nucleotide, phosphorothioate linkage
  modified_base 98: mod_base = OTHER; note = 2'-O-methyl nucleotide, phosphorothioate linkage
  modified_base 99: mod_base = OTHER; note = 2'-O-methyl nucleotide, phosphorothioate linkage
  modified_base 100: mod_base = OTHER; note = 2'-O-methyl nucleotide
  source 1..100: mol_type = other RNA
gttcacgcgctgagctgtcagttttagagctagaaatagcaagttaaaataaggctagtccgttatcaacttgaaaaagtggcaccgagtcggtgctttt

SEQ ID NO: 87 - RNA, 100 nt, synthetic construct
  misc_feature 1..100: note = Synthetic
  modified_base 1: mod_base = OTHER; note = 2'-O-methyl nucleotide, phosphorothioate linkage
  modified_base 2: mod_base = OTHER; note = 2'-O-methyl nucleotide, phosphorothioate linkage
  modified_base 3: mod_base = OTHER; note = 2'-O-methyl nucleotide, phosphorothioate linkage
  modified_base 29: mod_base = OTHER; note = 2'-O-methyl nucleotide
  modified_base 30: mod_base = OTHER; note = 2'-O-methyl nucleotide
  modified_base 31: mod_base = OTHER; note = 2'-O-methyl nucleotide
  modified_base 32: mod_base = OTHER; note = 2'-O-methyl nucleotide
  modified_base 33: mod_base = OTHER; note = 2'-O-methyl nucleotide
  modified_base 34: mod_base = OTHER; note = 2'-O-methyl nucleotide
  modified_base 35: mod_base = OTHER; note = 2'-O-methyl nucleotide
  modified_base 36: mod_base = OTHER; note = 2'-O-methyl nucleotide
  modified_base 37: mod_base = OTHER; note = 2'-O-methyl nucleotide
  modified_base 38: mod_base = OTHER; note = 2'-O-methyl nucleotide
  modified_base 39: mod_base = OTHER; note = 2'-O-methyl nucleotide
  modified_base 40: mod_base = OTHER; note = 2'-O-methyl nucleotide
  modified_base 69: mod_base = OTHER; note = 2'-O-methyl nucleotide
  modified_base 70: mod_base = OTHER; note = 2'-O-methyl nucleotide
  modified_base 71: mod_base = OTHER; note = 2'-O-methyl nucleotide
  modified_base 72: mod_base = OTHER; note = 2'-O-methyl nucleotide
  modified_base 73: mod_base = OTHER; note = 2'-O-methyl nucleotide
  modified_base 74: mod_base = OTHER; note = 2'-O-methyl nucleotide
  modified_base 75: mod_base = OTHER; note = 2'-O-methyl nucleotide
  modified_base 76: mod_base = OTHER; note = 2'-O-methyl nucleotide
  modified_base 77: mod_base = OTHER; note = 2'-O-methyl nucleotide
  modified_base 78: mod_base = OTHER; note = 2'-O-methyl nucleotide
  modified_base 79: mod_base = OTHER; note = 2'-O-methyl nucleotide
  modified_base 80: mod_base = OTHER; note = 2'-O-methyl nucleotide
  modified_base 81: mod_base = OTHER; note = 2'-O-methyl nucleotide
  modified_base 82: mod_base = OTHER; note = 2'-O-methyl nucleotide
  modified_base 83: mod_base = OTHER; note = 2'-O-methyl nucleotide
  modified_base 84: mod_base = OTHER; note = 2'-O-methyl nucleotide
  modified_base 85: mod_base = OTHER; note = 2'-O-methyl nucleotide
  modified_base 86: mod_base = OTHER; note = 2'-O-methyl nucleotide
  modified_base 87: mod_base = OTHER; note = 2'-O-methyl nucleotide
  modified_base 88: mod_base = OTHER; note = 2'-O-methyl nucleotide
  modified_base 89: mod_base = OTHER; note = 2'-O-methyl nucleotide
  modified_base 90: mod_base = OTHER; note = 2'-O-methyl nucleotide
  modified_base 91: mod_base = OTHER; note = 2'-O-methyl nucleotide
  modified_base 92: mod_base = OTHER; note = 2'-O-methyl nucleotide
  modified_base 93: mod_base = OTHER; note = 2'-O-methyl nucleotide
  modified_base 94: mod_base = OTHER; note = 2'-O-methyl nucleotide
  modified_base 95: mod_base = OTHER; note = 2'-O-methyl nucleotide
  modified_base 96: mod_base = OTHER; note = 2'-O-methyl nucleotide
  modified_base 97: mod_base = OTHER; note = 2'-O-methyl nucleotide, phosphorothioate linkage
  modified_base 98: mod_base = OTHER; note = 2'-O-methyl nucleotide, phosphorothioate linkage
  modified_base 99: mod_base = OTHER; note = 2'-O-methyl nucleotide, phosphorothioate linkage
  modified_base 100: mod_base = OTHER; note = 2'-O-methyl nucleotide
  source 1..100: mol_type = other RNA
gggggcccgtcagcaagagggttttagagctagaaatagcaagttaaaataaggctagtccgttatcaacttgaaaaagtggcaccgagtcggtgctttt

SEQ ID NO: 88 - RNA, 100 nt, synthetic construct
  misc_feature 1..100: note = Synthetic
  modified_base 1: mod_base = OTHER; note = 2'-O-methyl nucleotide, phosphorothioate linkage
  modified_base 2: mod_base = OTHER; note = 2'-O-methyl nucleotide, phosphorothioate linkage
  modified_base 3: mod_base = OTHER; note = 2'-O-methyl nucleotide, phosphorothioate linkage
  modified_base 29: mod_base = OTHER; note = 2'-O-methyl nucleotide
  modified_base 30: mod_base = OTHER; note = 2'-O-methyl nucleotide
  modified_base 31: mod_base = OTHER; note = 2'-O-methyl nucleotide
  modified_base 32: mod_base = OTHER; note = 2'-O-methyl nucleotide
  modified_base 33: mod_base = OTHER; note = 2'-O-methyl nucleotide
  modified_base 34: mod_base = OTHER; note = 2'-O-methyl nucleotide
  modified_base 35: mod_base = OTHER; note = 2'-O-methyl nucleotide
  modified_base 36: mod_base = OTHER; note = 2'-O-methyl nucleotide
  modified_base 37: mod_base = OTHER; note = 2'-O-methyl nucleotide
  modified_base 38: mod_base = OTHER; note = 2'-O-methyl nucleotide
  modified_base 39: mod_base = OTHER; note = 2'-O-methyl nucleotide
  modified_base 40: mod_base = OTHER; note = 2'-O-methyl nucleotide
  modified_base 69: mod_base = OTHER; note = 2'-O-methyl nucleotide
  modified_base 70: mod_base = OTHER; note = 2'-O-methyl nucleotide
  modified_base 71: mod_base = OTHER; note = 2'-O-methyl nucleotide
  modified_base 72: mod_base = OTHER; note = 2'-O-methyl nucleotide
  modified_base 73: mod_base = OTHER; note = 2'-O-methyl nucleotide
  modified_base 74: mod_base = OTHER; note = 2'-O-methyl nucleotide
  modified_base 75: mod_base = OTHER; note = 2'-O-methyl nucleotide
  modified_base 76: mod_base = OTHER; note = 2'-O-methyl nucleotide
  modified_base 77: mod_base = OTHER; note = 2'-O-methyl nucleotide
  modified_base 78: mod_base = OTHER; note = 2'-O-methyl nucleotide
  modified_base 79: mod_base = OTHER; note = 2'-O-methyl nucleotide
  modified_base 80: mod_base = OTHER; note = 2'-O-methyl nucleotide
  modified_base 81: mod_base = OTHER; note = 2'-O-methyl nucleotide
  modified_base 82: mod_base = OTHER; note = 2'-O-methyl nucleotide
  modified_base 83: mod_base = OTHER; note = 2'-O-methyl nucleotide
  modified_base 84: mod_base = OTHER; note = 2'-O-methyl nucleotide
  modified_base 85: mod_base = OTHER; note = 2'-O-methyl nucleotide
  modified_base 86: mod_base = OTHER; note = 2'-O-methyl nucleotide
  modified_base 87: mod_base = OTHER; note = 2'-O-methyl nucleotide
  modified_base 88: mod_base = OTHER; note = 2'-O-methyl nucleotide
  modified_base 89: mod_base = OTHER; note = 2'-O-methyl nucleotide
  modified_base 90: mod_base = OTHER; note = 2'-O-methyl nucleotide
  modified_base 91: mod_base = OTHER; note = 2'-O-methyl nucleotide
  modified_base 92: mod_base = OTHER; note = 2'-O-methyl nucleotide
  modified_base 93: mod_base = OTHER; note = 2'-O-methyl nucleotide
  modified_base 94: mod_base = OTHER; note = 2'-O-methyl nucleotide
  modified_base 95: mod_base = OTHER; note = 2'-O-methyl nucleotide
  modified_base 96: mod_base = OTHER; note = 2'-O-methyl nucleotide
  modified_base 97: mod_base = OTHER; note = 2'-O-methyl nucleotide, phosphorothioate linkage
  modified_base 98: mod_base = OTHER; note = 2'-O-methyl nucleotide, phosphorothioate linkage
  modified_base 99: mod_base = OTHER; note = 2'-O-methyl nucleotide, phosphorothioate linkage
  modified_base 100: mod_base = OTHER; note = 2'-O-methyl nucleotide
  source 1..100: mol_type = other RNA
gttgcaatctggattcagcggttttagagctagaaatagcaagttaaaataaggctagtccgttatcaacttgaaaaagtggcaccgagtcggtgctttt

SEQ ID NO: 89 - RNA, 100 nt, synthetic construct
  misc_feature 1..100: note = Synthetic
  modified_base 1: mod_base = OTHER; note = 2'-O-methyl nucleotide, phosphorothioate linkage
  modified_base 2: mod_base = OTHER; note = 2'-O-methyl nucleotide, phosphorothioate linkage
  modified_base 3: mod_base = OTHER; note = 2'-O-methyl nucleotide, phosphorothioate linkage
  modified_base 29: mod_base = OTHER; note = 2'-O-methyl nucleotide
  modified_base 30: mod_base = OTHER; note = 2'-O-methyl nucleotide
  modified_base 31: mod_base = OTHER; note = 2'-O-methyl nucleotide
  modified_base 32: mod_base = OTHER; note = 2'-O-methyl nucleotide
  modified_base 33: mod_base = OTHER; note = 2'-O-methyl nucleotide
  modified_base 34: mod_base = OTHER; note = 2'-O-methyl nucleotide
  modified_base 35: mod_base = OTHER; note = 2'-O-methyl nucleotide
  modified_base 36: mod_base = OTHER; note = 2'-O-methyl nucleotide
  modified_base 37: mod_base = OTHER; note = 2'-O-methyl nucleotide
  modified_base 38: mod_base = OTHER; note = 2'-O-methyl nucleotide
  modified_base 39: mod_base = OTHER; note = 2'-O-methyl nucleotide
  modified_base 40: mod_base = OTHER; note = 2'-O-methyl nucleotide
  modified_base 69: mod_base = OTHER; note = 2'-O-methyl nucleotide
  modified_base 70: mod_base = OTHER; note = 2'-O-methyl nucleotide
  modified_base 71: mod_base = OTHER; note = 2'-O-methyl nucleotide
  modified_base 72: mod_base = OTHER; note = 2'-O-methyl nucleotide
  modified_base 73: mod_base = OTHER; note = 2'-O-methyl nucleotide
  modified_base 74: mod_base = OTHER; note = 2'-O-methyl nucleotide
  modified_base 75: mod_base = OTHER; note = 2'-O-methyl nucleotide
  modified_base 76: mod_base = OTHER; note = 2'-O-methyl nucleotide
  modified_base 77: mod_base = OTHER; note = 2'-O-methyl nucleotide
  modified_base 78: mod_base = OTHER; note = 2'-O-methyl nucleotide
  modified_base 79: mod_base = OTHER; note = 2'-O-methyl nucleotide
  modified_base 80: mod_base = OTHER; note = 2'-O-methyl nucleotide
  modified_base 81: mod_base = OTHER; note = 2'-O-methyl nucleotide
  modified_base 82: mod_base = OTHER; note = 2'-O-methyl nucleotide
  modified_base 83: mod_base = OTHER; note = 2'-O-methyl nucleotide
  modified_base 84: mod_base = OTHER; note = 2'-O-methyl nucleotide
  modified_base 85: mod_base = OTHER; note = 2'-O-methyl nucleotide
  modified_base 86: mod_base = OTHER; note = 2'-O-methyl nucleotide
  modified_base 87: mod_base = OTHER; note = 2'-O-methyl nucleotide
  modified_base 88: mod_base = OTHER; note = 2'-O-methyl nucleotide
  modified_base 89: mod_base = OTHER; note = 2'-O-methyl nucleotide
  modified_base 90: mod_base = OTHER; note = 2'-O-methyl nucleotide
  modified_base 91: mod_base = OTHER; note = 2'-O-methyl nucleotide
  modified_base 92: mod_base = OTHER; note = 2'-O-methyl nucleotide
  modified_base 93: mod_base = OTHER; note = 2'-O-methyl nucleotide
  modified_base 94: mod_base = OTHER; note = 2'-O-methyl nucleotide
  modified_base 95: mod_base = OTHER; note = 2'-O-methyl nucleotide
  modified_base 96: mod_base = OTHER; note = 2'-O-methyl nucleotide
  modified_base 97: mod_base = OTHER; note = 2'-O-methyl nucleotide, phosphorothioate linkage
  modified_base 98: mod_base = OTHER; note = 2'-O-methyl nucleotide, phosphorothioate linkage
  modified_base 99: mod_base = OTHER; note = 2'-O-methyl nucleotide, phosphorothioate linkage
  modified_base 100: mod_base = OTHER; note = 2'-O-methyl nucleotide
  source 1..100: mol_type = other RNA
gtcatggaagacaaactcaagttttagagctagaaatagcaagttaaaataaggctagtccgttatcaacttgaaaaagtggcaccgagtcggtgctttt

SEQ ID NO: 90 - RNA, 100 nt, synthetic construct
  misc_feature 1..100: note = Synthetic
  modified_base 1: mod_base = OTHER; note = 2'-O-methyl nucleotide, phosphorothioate linkage
  modified_base 2: mod_base = OTHER; note = 2'-O-methyl nucleotide, phosphorothioate linkage
  modified_base 3: mod_base = OTHER; note = 2'-O-methyl nucleotide, phosphorothioate linkage
  modified_base 29: mod_base = OTHER; note = 2'-O-methyl nucleotide
  modified_base 30: mod_base = OTHER; note = 2'-O-methyl nucleotide
  modified_base 31: mod_base = OTHER; note = 2'-O-methyl nucleotide
  modified_base 32: mod_base = OTHER; note = 2'-O-methyl nucleotide
  modified_base 33: mod_base = OTHER; note = 2'-O-methyl nucleotide
  modified_base 34: mod_base = OTHER; note = 2'-O-methyl nucleotide
  modified_base 35: mod_base = OTHER; note = 2'-O-methyl nucleotide
  modified_base 36: mod_base = OTHER; note = 2'-O-methyl nucleotide
  modified_base 37: mod_base = OTHER; note = 2'-O-methyl nucleotide
  modified_base 38: mod_base = OTHER; note = 2'-O-methyl nucleotide
  modified_base 39: mod_base = OTHER; note = 2'-O-methyl nucleotide
  modified_base 40: mod_base = OTHER; note = 2'-O-methyl nucleotide
  modified_base 69: mod_base = OTHER; note = 2'-O-methyl nucleotide
  modified_base 70: mod_base = OTHER; note = 2'-O-methyl nucleotide
  modified_base 71: mod_base = OTHER; note = 2'-O-methyl nucleotide
  modified_base 72: mod_base = OTHER; note = 2'-O-methyl nucleotide
  modified_base 73: mod_base = OTHER; note = 2'-O-methyl nucleotide
  modified_base 74: mod_base = OTHER; note = 2'-O-methyl nucleotide
  modified_base 75: mod_base = OTHER; note = 2'-O-methyl nucleotide
  modified_base 76: mod_base = OTHER; note = 2'-O-methyl nucleotide
  modified_base 77: mod_base = OTHER; note = 2'-O-methyl nucleotide
  modified_base 78: mod_base = OTHER; note = 2'-O-methyl nucleotide
  modified_base 79: mod_base = OTHER; note = 2'-O-methyl nucleotide
  modified_base 80: mod_base = OTHER; note = 2'-O-methyl nucleotide
  modified_base 81: mod_base = OTHER; note = 2'-O-methyl nucleotide
  modified_base 82: mod_base = OTHER; note = 2'-O-methyl nucleotide
  modified_base 83: mod_base = OTHER; note = 2'-O-methyl nucleotide
  modified_base 84: mod_base = OTHER; note = 2'-O-methyl nucleotide
  modified_base 85: mod_base = OTHER; note = 2'-O-methyl nucleotide
  modified_base 86: mod_base = OTHER; note = 2'-O-methyl nucleotide
  modified_base 87: mod_base = OTHER; note = 2'-O-methyl nucleotide
  modified_base 88: mod_base = OTHER; note = 2'-O-methyl nucleotide
  modified_base 89: mod_base = OTHER; note = 2'-O-methyl nucleotide
  modified_base 90: mod_base = OTHER; note = 2'-O-methyl nucleotide
  modified_base 91: mod_base = OTHER; note = 2'-O-methyl nucleotide
  modified_base 92: mod_base = OTHER; note = 2'-O-methyl nucleotide
  modified_base 93: mod_base = OTHER; note = 2'-O-methyl nucleotide
  modified_base 94: mod_base = OTHER; note = 2'-O-methyl nucleotide
  modified_base 95: mod_base = OTHER; note = 2'-O-methyl nucleotide
  modified_base 96: mod_base = OTHER; note = 2'-O-methyl nucleotide
  modified_base 97: mod_base = OTHER; note = 2'-O-methyl nucleotide, phosphorothioate linkage
  modified_base 98: mod_base = OTHER; note = 2'-O-methyl nucleotide, phosphorothioate linkage
  modified_base 99: mod_base = OTHER; note = 2'-O-methyl nucleotide, phosphorothioate linkage
  modified_base 100: mod_base = OTHER; note = 2'-O-methyl nucleotide
  source 1..100: mol_type = other RNA
actgggcactgacgcagacagttttagagctagaaatagcaagttaaaataaggctagtccgttatcaacttgaaaaagtggcaccgagtcggtgctttt

SEQ ID NO: 91-99 - skipped (9 entries)

SEQ ID NO: 100 - RNA, 20 nt, synthetic construct
  misc_feature 1..20: note = Synthetic
  source 1..20: mol_type = other RNA
tttcccaaaaaccgtgttat

SEQ ID NO: 101 - RNA, 20 nt, synthetic construct
  misc_feature 1..20: note = Synthetic
  source 1..20: mol_type = other RNA
gaaagaggttcacaagcagg

SEQ ID NO: 102 - RNA, 20 nt, synthetic construct
  misc_feature 1..20: note = Synthetic
  source 1..20: mol_type = other RNA
gtggaaagaggttcacaagc

SEQ ID NO: 103 - RNA, 20 nt, synthetic construct
  misc_feature 1..20: note = Synthetic
  source 1..20: mol_type = other RNA
gagatgatggatctccaaca

SEQ ID NO: 104 - RNA, 20 nt, synthetic construct
  misc_feature 1..20: note = Synthetic
  source 1..20: mol_type = other RNA
taaggaaaaggctgccatgt

SEQ ID NO: 105 - RNA, 20 nt, synthetic construct
  misc_feature 1..20: note = Synthetic
  source 1..20: mol_type = other RNA
tgtaactgcaaactccaagc

SEQ ID NO: 106 - RNA, 20 nt, synthetic construct
  misc_feature 1..20: note = Synthetic
  source 1..20: mol_type = other RNA
cttccaataacacggttttt

SEQ ID NO: 107 - RNA, 20 nt, synthetic construct
  misc_feature 1..20: note = Synthetic
  source 1..20: mol_type = other RNA
aaaaaccgtgttattggaag

SEQ ID NO: 108 - RNA, 20 nt, synthetic construct
  misc_feature 1..20: note = Synthetic
  source 1..20: mol_type = other RNA
gttcacccattaagctgtca

SEQ ID NO: 109 - RNA, 20 nt, synthetic construct
  misc_feature 1..20: note = Synthetic
  source 1..20: mol_type = other RNA
ttcacccattaagctgtcat

SEQ ID NO: 110 - RNA, 20 nt, synthetic construct
  misc_feature 1..20: note = Synthetic
  source 1..20: mol_type = other RNA
acccattaagctgtcatggg

SEQ ID NO: 111 - RNA, 20 nt, synthetic construct
  misc_feature 1..20: note = Synthetic
  source 1..20: mol_type = other RNA
tggaatctccatgttcccca

SEQ ID NO: 112 - RNA, 20 nt, synthetic construct
  misc_feature 1..20: note = Synthetic
  source 1..20: mol_type = other RNA
agagtataatgaagaatctt

SEQ ID NO: 113 - RNA, 20 nt, synthetic construct
  misc_feature 1..20: note = Synthetic
  source 1..20: mol_type = other RNA
gctgattcataatcttctaa

SEQ ID NO: 114 - RNA, 20 nt, synthetic construct
  misc_feature 1..20: note = Synthetic
  source 1..20: mol_type = other RNA
caaattgaagggagagatga

SEQ ID NO: 115 - RNA, 20 nt, synthetic construct
  misc_feature 1..20: note = Synthetic
  source 1..20: mol_type = other RNA
tctttggtgttctaaggaaa

SEQ ID NO: 116 - RNA, 20 nt, synthetic construct
  misc_feature 1..20: note = Synthetic
  source 1..20: mol_type = other RNA
caataagcaacttgcagttc

SEQ ID NO: 117 - RNA, 20 nt, synthetic construct
  misc_feature 1..20: note = Synthetic
  source 1..20: mol_type = other RNA
acaataagcaacttgcagtt

SEQ ID NO: 118 - RNA, 20 nt, synthetic construct
  misc_feature 1..20: note = Synthetic
  source 1..20: mol_type = other RNA
gcttattgtttcaaatccag

SEQ ID NO: 119 - RNA, 20 nt, synthetic construct
  misc_feature 1..20: note = Synthetic
  source 1..20: mol_type = other RNA
acttccaataacacggtttt

SEQ ID NO: 120 - RNA, 20 nt, synthetic construct
  misc_feature 1..20: note = Synthetic
  source 1..20: mol_type = other RNA
cccattaagctgtcatgggt

SEQ ID NO: 121 - RNA, 20 nt, synthetic construct
  misc_feature 1..20: note = Synthetic
  source 1..20: mol_type = other RNA
tccactccatacaggcacac

SEQ ID NO: 122 - RNA, 20 nt, synthetic construct
  misc_feature 1..20: note = Synthetic
  source 1..20: mol_type = other RNA
aagactctgcacccagattt

SEQ ID NO: 123 - RNA, 20 nt, synthetic construct
  misc_feature 1..20: note = Synthetic
  source 1..20: mol_type = other RNA
agactctgcacccagattta

SEQ ID NO: 124 - RNA, 20 nt, synthetic construct
  misc_feature 1..20: note = Synthetic
  source 1..20: mol_type = other RNA
ccagtttccaccatgattaa

SEQ ID NO: 125 - RNA, 20 nt, synthetic construct
  misc_feature 1..20: note = Synthetic
  source 1..20: mol_type = other RNA
accatgattaagggtctcta

SEQ ID NO: 126 - RNA, 20 nt, synthetic construct
  misc_feature 1..20: note = Synthetic
  source 1..20: mol_type = other RNA
atagagacccttaatcatgg

SEQ ID NO: 127 - RNA, 20 nt, synthetic construct
  misc_feature 1..20: note = Synthetic
  source 1..20: mol_type = other RNA
tccatagagacccttaatca

SEQ ID NO: 128 - RNA, 20 nt, synthetic construct
  misc_feature 1..20: note = Synthetic
  source 1..20: mol_type = other RNA
taagggtctctatggaataa

SEQ ID NO: 129 - RNA, 20 nt, synthetic construct
  misc_feature 1..20: note = Synthetic
  source 1..20: mol_type = other RNA
agataaggaacagtggaaag

SEQ ID NO: 130 - RNA, 20 nt, synthetic construct
  misc_feature 1..20: note = Synthetic
  source 1..20: mol_type = other RNA
cagaataagattacagttgt

SEQ ID NO: 131 - RNA, 20 nt, synthetic construct
  misc_feature 1..20: note = Synthetic
  source 1..20: mol_type = other RNA
agaataagattacagttgtt

SEQ ID NO: 132 - RNA, 20 nt, synthetic construct
  misc_feature 1..20: note = Synthetic
  source 1..20: mol_type = other RNA
aacaactgtaatcttattct

SEQ ID NO: 133 - RNA, 20 nt, synthetic construct
  misc_feature 1..20: note = Synthetic
  source 1..20: mol_type = other RNA
gaataagattacagttgttg

SEQ ID NO: 134 - RNA, 20 nt, synthetic construct
  misc_feature 1..20: note = Synthetic
  source 1..20: mol_type = other RNA
caacaactgtaatcttattc

SEQ ID NO: 135 - RNA, 20 nt, synthetic construct
  misc_feature 1..20: note = Synthetic
  source 1..20: mol_type = other RNA
aagattacagttgttggggt

SEQ ID NO: 136 - RNA, 20 nt, synthetic construct
  misc_feature 1..20: note = Synthetic
  source 1..20: mol_type = other RNA
gttgttggggttggtgctgt

SEQ ID NO: 137 - RNA, 20 nt, synthetic construct
  misc_feature 1..20: note = Synthetic
  source 1..20: mol_type = other RNA
tgccatcagtatcttaatga

SEQ ID NO: 138 - RNA, 20 nt, synthetic construct
  misc_feature 1..20: note = Synthetic
  source 1..20: mol_type = other RNA
gtccttcattaagatactga

SEQ ID NO: 139 - RNA, 20 nt, synthetic construct
  misc_feature 1..20: note = Synthetic
  source 1..20: mol_type = other RNA
cagtatcttaatgaaggact

SEQ ID NO: 140 - RNA, 20 nt, synthetic construct
  misc_feature 1..20: note = Synthetic
  source 1..20: mol_type = other RNA
tgtcatcgaagacaaattga

SEQ ID NO: 141 - RNA, 20 nt, synthetic construct
  misc_feature 1..20: note = Synthetic
  source 1..20: mol_type = other RNA
gtcatcgaagacaaattgaa

SEQ ID NO: 142 - RNA, 20 nt, synthetic construct
  misc_feature 1..20: note = Synthetic
  source 1..20: mol_type = other RNA
agacaatctttggtgttcta

SEQ ID NO: 143 - RNA, 20 nt, synthetic construct
  misc_feature 1..20: note = Synthetic
  source 1..20: mol_type = other RNA
agaacaccaaagattgtctc

SEQ ID NO: 144 - RNA, 20 nt, synthetic construct
  misc_feature 1..20: note = Synthetic
  source 1..20: mol_type = other RNA
ggctggggcacgtcaacaag

SEQ ID NO: 145 - RNA, 20 nt, synthetic construct
  misc_feature 1..20: note = Synthetic
  source 1..20: mol_type = other RNA
gctggggcacgtcaacaaga

SEQ ID NO: 146 - RNA, 20 nt, synthetic construct
  misc_feature 1..20: note = Synthetic
  source 1..20: mol_type = other RNA
gggagaaagccgtcttaatt

SEQ ID NO: 147 - RNA, 20 nt, synthetic construct
  misc_feature 1..20: note = Synthetic
  source 1..20: mol_type = other RNA
taaagatgttcacgttacgc

SEQ ID NO: 148 - RNA, 20 nt, synthetic construct
  misc_feature 1..20: note = Synthetic
  source 1..20: mol_type = other RNA
gggctgtattttacaacatt

SEQ ID NO: 149 - RNA, 20 nt, synthetic construct
  misc_feature 1..20: note = Synthetic
  source 1..20: mol_type = other RNA
tacgtggcttggaagataag

SEQ ID NO: 150 - RNA, 20 nt, synthetic construct
  misc_feature 1..20: note = Synthetic
  source 1..20: mol_type = other RNA
acttatcttccaagccacgt

SEQ ID NO: 151 - RNA, 20 nt, synthetic construct
  misc_feature 1..20: note = Synthetic
  source 1..20: mol_type = other RNA
tgcaaccacttccaataaca

SEQ ID NO: 152 - RNA, 20 nt, synthetic construct
  misc_feature 1..20: note = Synthetic
  source 1..20: mol_type = other RNA
agccagattccgttacctga

SEQ ID NO: 153 - RNA, 20 nt, synthetic construct
  misc_feature 1..20: note = Synthetic
  source 1..20: mol_type = other RNA
gccagattccgttacctgat

SEQ ID NO: 154 - RNA, 20 nt, synthetic construct
  misc_feature 1..20: note = Synthetic
  source 1..20: mol_type = other RNA
ccagattccgttacctgatg

SEQ ID NO: 155 - RNA, 20 nt, synthetic construct
  misc_feature 1..20: note = Synthetic
  source 1..20: mol_type = other RNA
ccccatcaggtaacggaatc

SEQ ID NO: 156 - RNA, 20 nt, synthetic construct
  misc_feature 1..20: note = Synthetic
  source 1..20: mol_type = other RNA
cccacccatgacagcttaat

SEQ ID NO: 157 - RNA, 20 nt, synthetic construct
  misc_feature 1..20: note = Synthetic
  source 1..20: mol_type = other RNA
acccacccatgacagcttaa

SEQ ID NO: 158 - RNA, 20 nt, synthetic construct
  misc_feature 1..20: note = Synthetic
  source 1..20: mol_type = other RNA
agctgtcatgggtgggtcct

SEQ ID NO: 159 - RNA, 20 nt, synthetic construct
  misc_feature 1..20: note = Synthetic
  source 1..20: mol_type = other RNA
gctgtcatgggtgggtcctt

SEQ ID NO: 160 - RNA, 20 nt, synthetic construct
  misc_feature 1..20: note = Synthetic
  source 1..20: mol_type = other RNA
ctgtcatgggtgggtccttg

SEQ ID NO: 161 - RNA, 20 nt, synthetic construct
  misc_feature 1..20: note = Synthetic
  source 1..20: mol_type = other RNA
gggtgggtccttggggaaca

SEQ ID NO: 162 - RNA, 20 nt, synthetic construct
  misc_feature 1..20: note = Synthetic
  source 1..20: mol_type = other RNA
gagattccagtgtgcctgta

SEQ ID NO: 163 - RNA, 20 nt, synthetic construct
  misc_feature 1..20: note = Synthetic
  source 1..20: mol_type = other RNA
tccagtgtgcctgtatggag

SEQ ID NO: 164 - RNA, 20 nt, synthetic construct
  misc_feature 1..20: note = Synthetic
  source 1..20: mol_type = other RNA
atctgggtgcagagtcttca

SEQ ID NO: 165 - RNA, 20 nt, synthetic construct
  misc_feature 1..20: note = Synthetic
  source 1..20: mol_type = other RNA
aatctgggtgcagagtcttc

SEQ ID NO: 166 - RNA, 20 nt, synthetic construct
  misc_feature 1..20: note = Synthetic
  source 1..20: mol_type = other RNA
tatgaggtgatcaaactcaa

SEQ ID NO: 167 - RNA, 20 nt, synthetic construct
  misc_feature 1..20: note = Synthetic
  source 1..20: mol_type = other RNA
tggactctctgtagcagatt

SEQ ID NO: 168 - RNA, 20 nt, synthetic construct
  misc_feature 1..20: note = Synthetic
  source 1..20: mol_type = other RNA
cccagtttccaccatgatta

SEQ ID NO: 169 - RNA, 20 nt, synthetic construct
  misc_feature 1..20: note = Synthetic
  source 1..20: mol_type = other RNA
tggggttggtgctgttggca

SEQ ID NO: 170 - RNA, 20 nt, synthetic construct
  misc_feature 1..20: note = Synthetic
  source 1..20: mol_type = other RNA
gaacaccaaagattgtctct

SEQ ID NO: 171 - RNA, 20 nt, synthetic construct
  misc_feature 1..20: note = Synthetic
  source 1..20: mol_type = other RNA
cagattccgttacctgatgg

SEQ ID NO: 172 - RNA, 20 nt, synthetic construct
  misc_feature 1..20: note = Synthetic
  source 1..20: mol_type = other RNA
ttacctgatgggggaaagac

SEQ ID NO: 173 - RNA, 20 nt, synthetic construct
  misc_feature 1..20: note = Synthetic
  source 1..20: mol_type = other RNA
gtctttcccccatcaggtaa

SEQ ID NO: 174 - RNA, 20 nt, synthetic construct
  misc_feature 1..20: note = Synthetic
  source 1..20: mol_type = other RNA
tacctgatgggggaaagact

SEQ ID NO: 175 - RNA, 20 nt, synthetic construct
  misc_feature 1..20: note = Synthetic
  source 1..20: mol_type = other RNA
ctcccagtctttcccccatc

SEQ ID NO: 176 - RNA, 20 nt, synthetic construct
  misc_feature 1..20: note = Synthetic
  source 1..20: mol_type = other RNA
aactcaaaggctacacatcc

SEQ ID NO: 177 - RNA, 20 nt, synthetic construct
  misc_feature 1..20: note = Synthetic
  source 1..20: mol_type = other RNA
actcaaaggctacacatcct

SEQ ID NO: 178 - RNA, 20 nt, synthetic construct
  misc_feature 1..20: note = Synthetic
  source 1..20: mol_type = other RNA
ggctacacatcctgggccat

SEQ ID NO: 179 - RNA, 20 nt, synthetic construct
  misc_feature 1..20: note = Synthetic
  source 1..20: mol_type = other RNA
tacagagagtccaatggccc

SEQ ID NO: 180 - RNA, 20 nt, synthetic construct
  misc_feature 1..20: note = Synthetic
  source 1..20: mol_type = other RNA
atctgctacagagagtccaa

SEQ ID NO: 181 - RNA, 20 nt, synthetic construct
  misc_feature 1..20: note = Synthetic
  source 1..20: mol_type = other RNA
cccttaatcatggtggaaac

SEQ ID NO: 182 - RNA, 20 nt, synthetic construct
  misc_feature 1..20: note = Synthetic
  source 1..20: mol_type = other RNA
ccttgcattttgggacagaa

SEQ ID NO: 183 - RNA, 20 nt, synthetic construct
  misc_feature 1..20: note = Synthetic
  source 1..20: mol_type = other RNA
ccattctgtcccaaaatgca

SEQ ID NO: 184 - RNA, 20 nt, synthetic construct
  misc_feature 1..20: note = Synthetic
  source 1..20: mol_type = other RNA
agtggatatcttgacctacg

SEQ ID NO: 185 - RNA, 20 nt, synthetic construct
  misc_feature 1..20: note = Synthetic
  source 1..20: mol_type = other RNA
atatcttgacctacgtggct

SEQ ID NO: 186 - RNA, 20 nt, synthetic construct
  misc_feature 1..20: note = Synthetic
  source 1..20: mol_type = other RNA
tattggaagtggttgcaatc

SEQ ID NO: 187 - RNA, 20 nt, synthetic construct
  misc_feature 1..20: note = Synthetic
  source 1..20: mol_type = other RNA
tctttcccagagacaatctt

SEQ ID NO: 188 - RNA, 20 nt, synthetic construct
  misc_feature 1..20: note = Synthetic
  source 1..20: mol_type = other RNA
ggtggttgagagtgcttatg

SEQ ID NO: 189 - RNA, 20 nt, synthetic construct
  misc_feature 1..20: note = Synthetic
  source 1..20: mol_type = other RNA
cctcagtgttccttgcattt

SEQ ID NO: 190 - RNA, 20 nt, synthetic construct
  misc_feature 1..20: note = Synthetic
  source 1..20: mol_type = other RNA
ctcagtgttccttgcatttt

SEQ ID NO: 191 - RNA, 20 nt, synthetic construct
  misc_feature 1..20: note = Synthetic
  source 1..20: mol_type = other RNA
ccaaaatgcaaggaacactg

SEQ ID NO: 192 - RNA, 20 nt, synthetic construct
  misc_feature 1..20: note = Synthetic
  source 1..20: mol_type = other RNA
acgtaggtcaagatatccac

SEQ ID NO: 193-199 - skipped (7 entries)

SEQ ID NO: 200 - RNA, 22 nt, synthetic construct
  misc_feature 1..22: note = Synthetic
  source 1..22: mol_type = other RNA
gttttagagctatgctgttttg

SEQ ID NO: 201 - RNA, 80 nt, synthetic construct
  misc_feature 1..80: note = Synthetic
  source 1..80: mol_type = other RNA
gttttagagctagaaatagcaagttaaaataaggctagtccgttatcaacttgaaaaagtggcaccgagtcggtgctttt

SEQ ID NO: 202 - RNA, 68 nt, synthetic construct
  misc_feature 1..68: note = Synthetic
  source 1..68: mol_type = other RNA
gttttagagctagaaatagcaagttaaaataaggctagtccgttatcaacttggcaccgagtcggtgc

SEQ ID NO: 203 - RNA, 76 nt, synthetic construct
  misc_feature 1..76: note = Synthetic
  source 1..76: mol_type = other RNA
gttttagagctagaaatagcaagttaaaataaggctagtccgttatcaacttgaaaaagtggcaccgagtcggtgc

SEQ ID NO: 204-299 - skipped (96 entries)

SEQ ID NO: 300 - RNA, 100 nt, synthetic construct
  misc_feature 1..100: note = Synthetic
  variation 1..20: note = n is a, c, g, or u
  modified_base 1: mod_base = OTHER; note = 2'-O-methyl nucleotide, phosphorothioate linkage
  modified_base 2: mod_base = OTHER; note = 2'-O-methyl nucleotide, phosphorothioate linkage
  modified_base 3: mod_base = OTHER; note = 2'-O-methyl nucleotide, phosphorothioate linkage
  modified_base 29: mod_base = OTHER; note = 2'-O-methyl nucleotide
  modified_base 30: mod_base = OTHER; note = 2'-O-methyl nucleotide
  modified_base 31: mod_base = OTHER; note = 2'-O-methyl nucleotide
  modified_base 32: mod_base = OTHER; note = 2'-O-methyl nucleotide
  modified_base 33: mod_base = OTHER; note = 2'-O-methyl nucleotide
  modified_base 34: mod_base = OTHER; note = 2'-O-methyl nucleotide
  modified_base 35: mod_base = OTHER; note = 2'-O-methyl nucleotide
  modified_base 36: mod_base = OTHER; note = 2'-O-methyl nucleotide
  modified_base 37: mod_base = OTHER; note = 2'-O-methyl nucleotide
  modified_base 38: mod_base = OTHER; note = 2'-O-methyl nucleotide
  modified_base 39: mod_base = OTHER; note = 2'-O-methyl nucleotide
  modified_base 40: mod_base = OTHER; note = 2'-O-methyl nucleotide
  modified_base 69: mod_base = OTHER; note = 2'-O-methyl nucleotide
  modified_base 70: mod_base = OTHER; note = 2'-O-methyl nucleotide
  modified_base 71: mod_base = OTHER; note = 2'-O-methyl nucleotide
  modified_base 72: mod_base = OTHER; note = 2'-O-methyl nucleotide
  modified_base 73: mod_base = OTHER; note = 2'-O-methyl nucleotide
  modified_base 74: mod_base = OTHER; note = 2'-O-methyl nucleotide
  modified_base 75: mod_base = OTHER; note = 2'-O-methyl nucleotide
  modified_base 76: mod_base = OTHER; note = 2'-O-methyl nucleotide
  modified_base 77: mod_base = OTHER; note = 2'-O-methyl nucleotide
  modified_base 78: mod_base = OTHER; note = 2'-O-methyl nucleotide
  modified_base 79: mod_base = OTHER; note = 2'-O-methyl nucleotide
  modified_base 80: mod_base = OTHER; note = 2'-O-methyl nucleotide
  modified_base 81: mod_base = OTHER; note = 2'-O-methyl nucleotide
  modified_base 82: mod_base = OTHER; note = 2'-O-methyl nucleotide
  modified_base 83: mod_base = OTHER; note = 2'-O-methyl nucleotide
  modified_base 84: mod_base = OTHER; note = 2'-O-methyl nucleotide
  modified_base 85: mod_base = OTHER; note = 2'-O-methyl nucleotide
  modified_base 86: mod_base = OTHER; note = 2'-O-methyl nucleotide
  modified_base 87: mod_base = OTHER; note = 2'-O-methyl nucleotide
  modified_base 88: mod_base = OTHER; note = 2'-O-methyl nucleotide
  modified_base 89: mod_base = OTHER; note = 2'-O-methyl nucleotide
  modified_base 90: mod_base = OTHER; note = 2'-O-methyl nucleotide
  modified_base 91: mod_base = OTHER; note = 2'-O-methyl nucleotide
  modified_base 92: mod_base = OTHER; note = 2'-O-methyl nucleotide
  modified_base 93: mod_base = OTHER; note = 2'-O-methyl nucleotide
  modified_base 94: mod_base = OTHER; note = 2'-O-methyl nucleotide
  modified_base 95: mod_base = OTHER; note = 2'-O-methyl nucleotide
  modified_base 96: mod_base = OTHER; note = 2'-O-methyl nucleotide
  modified_base 97: mod_base = OTHER; note = 2'-O-methyl nucleotide, phosphorothioate linkage
  modified_base 98: mod_base = OTHER; note = 2'-O-methyl nucleotide, phosphorothioate linkage
  modified_base 99: mod_base = OTHER; note = 2'-O-methyl nucleotide, phosphorothioate linkage
  modified_base 100: mod_base = OTHER; note = 2'-O-methyl nucleotide
  source 1..100: mol_type = other RNA
nnnnnnnnnnnnnnnnnnnngttttagagctagaaatagcaagttaaaataaggctagtccgttatcaacttgaaaaagtggcaccgagtcggtgctttt

SEQ ID NO: 301-399 - skipped (99 entries)

SEQ ID NO: 400 - RNA, 80 nt, synthetic construct; identical to SEQ ID NO: 201
  misc_feature 1..80: note = Synthetic
  modified_base 61: mod_base = OTHER; note = 2'-O-methyl nucleotide
  modified_base 62: mod_base = OTHER; note = 2'-O-methyl nucleotide
  modified_base 63: mod_base = OTHER; note = 2'-O-methyl nucleotide
  modified_base 64: mod_base = OTHER; note = 2'-O-methyl nucleotide
  modified_base 65: mod_base = OTHER; note = 2'-O-methyl nucleotide
  modified_base 66: mod_base = OTHER; note = 2'-O-methyl nucleotide
  modified_base 67: mod_base = OTHER; note = 2'-O-methyl nucleotide
  modified_base 68: mod_base = OTHER; note = 2'-O-methyl nucleotide
  modified_base 69: mod_base = OTHER; note = 2'-O-methyl nucleotide
  modified_base 70: mod_base = OTHER; note = 2'-O-methyl nucleotide
  modified_base 71: mod_base = OTHER; note = 2'-O-methyl nucleotide
  modified_base 72: mod_base = OTHER; note = 2'-O-methyl nucleotide
  modified_base 73: mod_base = OTHER; note = 2'-O-methyl nucleotide
  modified_base 74: mod_base = OTHER; note = 2'-O-methyl nucleotide
  modified_base 75: mod_base = OTHER; note = 2'-O-methyl nucleotide
  modified_base 76: mod_base = OTHER; note = 2'-O-methyl nucleotide
  modified_base 77: mod_base = OTHER; note = 2'-O-methyl nucleotide, phosphorothioate linkage
  modified_base 78: mod_base = OTHER; note = 2'-O-methyl nucleotide, phosphorothioate linkage
  modified_base 79: mod_base = OTHER; note = 2'-O-methyl nucleotide, phosphorothioate linkage
  modified_base 80: mod_base = OTHER; note = 2'-O-methyl nucleotide
  source 1..80: mol_type = other RNA

SEQ ID NO: 401 - RNA, 80 nt, synthetic construct; identical to SEQ ID NO: 201
  misc_feature 1..80: note = Synthetic
  modified_base 49: mod_base = OTHER; note = 2'-O-methyl nucleotide
  modified_base 50: mod_base = OTHER; note = 2'-O-methyl nucleotide
  modified_base 51: mod_base = OTHER; note = 2'-O-methyl nucleotide
  modified_base 52: mod_base = OTHER; note = 2'-O-methyl nucleotide
  modified_base 53: mod_base = OTHER; note = 2'-O-methyl nucleotide
  modified_base 54: mod_base = OTHER; note = 2'-O-methyl nucleotide
  modified_base 55: mod_base = OTHER; note = 2'-O-methyl nucleotide
  modified_base 56: mod_base = OTHER; note = 2'-O-methyl nucleotide
  modified_base 57: mod_base = OTHER; note = 2'-O-methyl nucleotide
  modified_base 58: mod_base = OTHER; note = 2'-O-methyl nucleotide
  modified_base 59: mod_base = OTHER; note = 2'-O-methyl nucleotide
  modified_base 60: mod_base = OTHER; note = 2'-O-methyl nucleotide
  modified_base 61: mod_base = OTHER; note = 2'-O-methyl nucleotide
  modified_base 62: mod_base = OTHER; note = 2'-O-methyl nucleotide
  modified_base 63: mod_base = OTHER; note = 2'-O-methyl nucleotide
  modified_base 64: mod_base = OTHER; note = 2'-O-methyl nucleotide
  modified_base 65: mod_base = OTHER; note = 2'-O-methyl nucleotide
  modified_base 66: mod_base = OTHER; note = 2'-O-methyl nucleotide
  modified_base 67: mod_base = OTHER; note = 2'-O-methyl nucleotide
  modified_base 68: mod_base = OTHER; note = 2'-O-methyl nucleotide
  modified_base 69: mod_base = OTHER; note = 2'-O-methyl nucleotide
  modified_base 70: mod_base = OTHER; note = 2'-O-methyl nucleotide
  modified_base 71: mod_base = OTHER; note = 2'-O-methyl nucleotide
  modified_base 72: mod_base = OTHER; note = 2'-O-methyl nucleotide
  modified_base 73: mod_base = OTHER; note = 2'-O-methyl nucleotide
  modified_base 74: mod_base = OTHER; note = 2'-O-methyl nucleotide
  modified_base 75: mod_base = OTHER; note = 2'-O-methyl nucleotide
  modified_base 76: mod_base = OTHER; note = 2'-O-methyl nucleotide
  modified_base 77: mod_base = OTHER; note = 2'-O-methyl nucleotide, phosphorothioate linkage
  modified_base 78: mod_base = OTHER; note = 2'-O-methyl nucleotide, phosphorothioate linkage
  modified_base 79: mod_base = OTHER; note = 2'-O-methyl nucleotide, phosphorothioate linkage
  modified_base 80: mod_base = OTHER; note = 2'-O-methyl nucleotide
  source 1..80: mol_type = other RNA

SEQ ID NO: 402 - RNA, 80 nt, synthetic construct; identical to SEQ ID NO: 201
  misc_feature 1..80: note = Synthetic
  modified_base 13: mod_base = OTHER; note = 2'-O-methyl nucleotide
  modified_base 14: mod_base = OTHER; note = 2'-O-methyl nucleotide
  modified_base 15: mod_base = OTHER; note = 2'-O-methyl nucleotide
  modified_base 16: mod_base = OTHER; note = 2'-O-methyl nucleotide
  modified_base 77: mod_base = OTHER; note = 2'-O-methyl nucleotide, phosphorothioate linkage
  modified_base 78: mod_base = OTHER; note = 2'-O-methyl nucleotide, phosphorothioate linkage
  modified_base 79: mod_base = OTHER; note = 2'-O-methyl nucleotide, phosphorothioate linkage
  source 1..80: mol_type = other RNA

SEQ ID NO: 403 - RNA, 80 nt, synthetic construct; identical to SEQ ID NO: 201
  misc_feature 1..80: note = Synthetic
  modified_base 9: mod_base = OTHER; note = 2'-O-methyl nucleotide
  modified_base 10: mod_base = OTHER; note = 2'-O-methyl nucleotide
  modified_base 11: mod_base = OTHER; note = 2'-O-methyl nucleotide
  modified_base 12: mod_base = OTHER; note = 2'-O-methyl nucleotide
  modified_base 17: mod_base = OTHER; note = 2'-O-methyl nucleotide
  modified_base 18: mod_base = OTHER; note = 2'-O-methyl nucleotide
  modified_base 19: mod_base = OTHER; note = 2'-O-methyl nucleotide
  modified_base 20: mod_base = OTHER; note = 2'-O-methyl nucleotide
  modified_base 77: mod_base = OTHER; note = 2'-O-methyl nucleotide, phosphorothioate linkage
  modified_base 78: mod_base = OTHER; note = 2'-O-methyl nucleotide, phosphorothioate linkage
  modified_base 79: mod_base = OTHER; note = 2'-O-methyl nucleotide, phosphorothioate linkage
  source 1..80: mol_type = other RNA

SEQ ID NO: 404 - RNA, 80 nt, synthetic construct; identical to SEQ ID NO: 201
  misc_feature 1..80: note = Synthetic
  modified_base 9: mod_base = OTHER; note = 2'-O-methyl nucleotide
  modified_base 10: mod_base = OTHER; note = 2'-O-methyl nucleotide
  modified_base 11: mod_base = OTHER; note = 2'-O-methyl nucleotide
  modified_base 12: mod_base = OTHER; note = 2'-O-methyl nucleotide
  modified_base 13: mod_base = OTHER; note = 2'-O-methyl nucleotide
  modified_base 14: mod_base = OTHER; note = 2'-O-methyl nucleotide
  modified_base 15: mod_base = OTHER; note = 2'-O-methyl nucleotide
  modified_base 16: mod_base = OTHER; note = 2'-O-methyl nucleotide
  modified_base 17: mod_base = OTHER; note = 2'-O-methyl nucleotide
  modified_base 18: mod_base = OTHER; note = 2'-O-methyl nucleotide
  modified_base 19: mod_base = OTHER; note = 2'-O-methyl nucleotide
  modified_base 20: mod_base = OTHER; note = 2'-O-methyl nucleotide
  modified_base 77: mod_base = OTHER; note = 2'-O-methyl nucleotide, phosphorothioate linkage
  modified_base 78: mod_base = OTHER; note = 2'-O-methyl nucleotide, phosphorothioate linkage
  modified_base 79: mod_base = OTHER; note = 2'-O-methyl nucleotide, phosphorothioate linkage
  source 1..80: mol_type = other RNA

SEQ ID NO: 405 - RNA, 80 nt, synthetic construct; identical to SEQ ID NO: 201
  misc_feature 1..80: note = Synthetic
  modified_base 9: mod_base = OTHER; note = 2'-O-methyl nucleotide
  modified_base 10: mod_base = OTHER; note = 2'-O-methyl nucleotide
  modified_base 11: mod_base = OTHER; note = 2'-O-methyl nucleotide
  modified_base 12: mod_base = OTHER; note = 2'-O-methyl nucleotide
  modified_base 13: mod_base = OTHER; note = 2'-O-methyl nucleotide
  modified_base 14: mod_base = OTHER; note = 2'-O-methyl nucleotide
  modified_base 15: mod_base = OTHER; note = 2'-O-methyl nucleotide
  modified_base 16: mod_base = OTHER; note = 2'-O-methyl nucleotide
  modified_base 17: mod_base = OTHER; note = 2'-O-methyl nucleotide
  modified_base 18: mod_base = OTHER; note = 2'-O-methyl nucleotide
  modified_base 19: mod_base = OTHER; note = 2'-O-methyl nucleotide
  modified_base 20: mod_base = OTHER; note = 2'-O-methyl nucleotide
  modified_base 49: mod_base = OTHER; note = 2'-O-methyl nucleotide
  modified_base 50: mod_base = OTHER; note = 2'-O-methyl nucleotide
  modified_base 51: mod_base = OTHER; note = 2'-O-methyl nucleotide
  modified_base 52: mod_base = OTHER; note = 2'-O-methyl nucleotide
  modified_base 53: mod_base = OTHER; note = 2'-O-methyl nucleotide
  modified_base 54: mod_base = OTHER; note = 2'-O-methyl nucleotide
  modified_base 55: mod_base = OTHER; note = 2'-O-methyl nucleotide
  modified_base 56: mod_base = OTHER; note = 2'-O-methyl nucleotide
  modified_base 57: mod_base = OTHER; note = 2'-O-methyl nucleotide
  modified_base 58: mod_base = OTHER; note = 2'-O-methyl nucleotide
  modified_base 59: mod_base = OTHER; note = 2'-O-methyl nucleotide
  modified_base 60: mod_base = OTHER; note = 2'-O-methyl nucleotide
  modified_base 61: mod_base = OTHER; note = 2'-O-methyl nucleotide
  modified_base 62: mod_base = OTHER; note = 2'-O-methyl nucleotide
  modified_base 63: mod_base = OTHER; note = 2'-O-methyl nucleotide
  modified_base 64: mod_base = OTHER; note = 2'-O-methyl nucleotide
  modified_base 65: mod_base = OTHER; note = 2'-O-methyl nucleotide
  modified_base 66: mod_base = OTHER; note = 2'-O-methyl nucleotide
  modified_base 67: mod_base = OTHER; note = 2'-O-methyl nucleotide
  modified_base 68: mod_base = OTHER; note = 2'-O-methyl nucleotide
  modified_base 69: mod_base = OTHER; note = 2'-O-methyl nucleotide
  modified_base 70: mod_base = OTHER; note = 2'-O-methyl nucleotide
  modified_base 71: mod_base = OTHER; note = 2'-O-methyl nucleotide
  modified_base 72: mod_base = OTHER; note = 2'-O-methyl nucleotide
  modified_base 73: mod_base = OTHER; note = 2'-O-methyl nucleotide
  modified_base 74: mod_base = OTHER; note = 2'-O-methyl nucleotide
  modified_base 75: mod_base = OTHER; note = 2'-O-methyl nucleotide
  modified_base 76: mod_base = OTHER; note = 2'-O-methyl nucleotide
  modified_base 77: mod_base = OTHER; note = 2'-O-methyl nucleotide, phosphorothioate linkage
  modified_base 78: mod_base = OTHER; note = 2'-O-methyl nucleotide, phosphorothioate linkage
  modified_base 79: mod_base = OTHER; note = 2'-O-methyl nucleotide, phosphorothioate linkage
  modified_base 80: mod_base = OTHER; note = 2'-O-methyl nucleotide
  source 1..80: mol_type = other RNA

SEQ ID NO: 406 - RNA, 80 nt, synthetic construct; identical to SEQ ID NO: 201
  misc_feature 1..80: note = Synthetic
  modified_base 1: mod_base = OTHER; note = 2'-O-methyl nucleotide
  modified_base 6: mod_base = OTHER; note = 2'-O-methyl nucleotide
  modified_base 9: mod_base = OTHER; note = 2'-O-methyl nucleotide
  modified_base 10: mod_base = OTHER; note = 2'-O-methyl nucleotide
  modified_base 11: mod_base = OTHER; note = 2'-O-methyl nucleotide
  modified_base 12: mod_base = OTHER; note = 2'-O-methyl nucleotide
  modified_base 13: mod_base = OTHER; note = 2'-O-methyl nucleotide
  modified_base 14: mod_base = OTHER; note = 2'-O-methyl nucleotide
  modified_base 15: mod_base = OTHER; note = 2'-O-methyl nucleotide
  modified_base 16: mod_base = OTHER; note = 2'-O-methyl nucleotide
  modified_base 17: mod_base = OTHER; note = 2'-O-methyl nucleotide
  modified_base 18: mod_base = OTHER; note = 2'-O-methyl nucleotide
  modified_base 19: mod_base = OTHER; note = 2'-O-methyl nucleotide
  modified_base 20: mod_base = OTHER; note = 2'-O-methyl nucleotide
  modified_base 49: mod_base = OTHER; note = 2'-O-methyl nucleotide
  modified_base 50: mod_base = OTHER; note = 2'-O-methyl nucleotide
  modified_base 51: mod_base = OTHER; note = 2'-O-methyl nucleotide
  modified_base 52: mod_base = OTHER; note = 2'-O-methyl nucleotide
  modified_base 53: mod_base = OTHER; note = 2'-O-methyl nucleotide
  modified_base 54: mod_base = OTHER; note = 2'-O-methyl nucleotide
  modified_base 55: mod_base = OTHER; note = 2'-O-methyl nucleotide
  modified_base 56: mod_base = OTHER; note = 2'-O-methyl nucleotide
  modified_base 57: mod_base = OTHER; note = 2'-O-methyl nucleotide
  modified_base 58: mod_base = OTHER; note = 2'-O-methyl nucleotide
  modified_base 59: mod_base = OTHER; note = 2'-O-methyl nucleotide
  modified_base 60: mod_base = OTHER; note = 2'-O-methyl nucleotide
  modified_base 61: mod_base = OTHER; note = 2'-O-methyl nucleotide
  modified_base 62: mod_base = OTHER; note = 2'-O-methyl nucleotide
  modified_base 63: mod_base = OTHER; note = 2'-O-methyl nucleotide
  modified_base 64: mod_base = OTHER; note = 2'-O-methyl nucleotide
  modified_base 65: mod_base = OTHER; note = 2'-O-methyl nucleotide
  modified_base 66: mod_base = OTHER; note = 2'-O-methyl nucleotide
  modified_base 67: mod_base = OTHER; note = 2'-O-methyl nucleotide
  modified_base 68: mod_base = OTHER; note = 2'-O-methyl nucleotide
  modified_base 69: mod_base = OTHER; note = 2'-O-methyl nucleotide
  modified_base 70: mod_base = OTHER; note = 2'-O-methyl nucleotide
  modified_base 71: mod_base = OTHER; note = 2'-O-methyl nucleotide
  modified_base 72: mod_base = OTHER; note = 2'-O-methyl nucleotide
  modified_base 73: mod_base = OTHER; note = 2'-O-methyl nucleotide
  modified_base 74: mod_base = OTHER; note = 2'-O-methyl nucleotide
  modified_base 75: mod_base = OTHER; note = 2'-O-methyl nucleotide
  modified_base 76: mod_base = OTHER; note = 2'-O-methyl nucleotide
  modified_base 77: mod_base = OTHER; note = 2'-O-methyl nucleotide, phosphorothioate linkage
  modified_base 78: mod_base = OTHER; note = 2'-O-methyl nucleotide, phosphorothioate linkage
  modified_base 79: mod_base = OTHER; note = 2'-O-methyl nucleotide, phosphorothioate linkage
  modified_base 80: mod_base = OTHER; note = 2'-O-methyl nucleotide
  source 1..80: mol_type = other RNA

SEQ ID NO: 407 - RNA, 80 nt, synthetic construct; identical to SEQ ID NO: 201
  misc_feature 1..80: note = Synthetic
  modified_base 1: mod_base = OTHER; note = 2'-fluoro modification
  modified_base 2: mod_base = OTHER; note = 2'-fluoro modification
  modified_base 3: mod_base = OTHER; note = 2'-fluoro modification
  modified_base 4: mod_base = OTHER; note = 2'-fluoro modification
  modified_base 5: mod_base = OTHER; note = 2'-fluoro modification
  modified_base 6: mod_base = OTHER; note = 2'-fluoro modification
  modified_base 9: mod_base = OTHER; note = 2'-O-methyl nucleotide
  modified_base 10: mod_base = OTHER; note = 2'-O-methyl nucleotide
  modified_base 11: mod_base = OTHER; note = 2'-O-methyl nucleotide
  modified_base 12: mod_base = OTHER; note = 2'-O-methyl nucleotide
  modified_base 13: mod_base = OTHER; note = 2'-O-methyl nucleotide
  modified_base 14: mod_base = OTHER; note = 2'-O-methyl nucleotide
  modified_base 15: mod_base = OTHER; note = 2'-O-methyl nucleotide
  modified_base 16: mod_base = OTHER; note = 2'-O-methyl nucleotide
  modified_base 17: mod_base = OTHER; note = 2'-O-methyl nucleotide
  modified_base 18: mod_base = OTHER; note = 2'-O-methyl nucleotide
  modified_base 19: mod_base = OTHER; note = 2'-O-methyl nucleotide
  modified_base 20: mod_base = OTHER; note = 2'-O-methyl nucleotide
  modified_base 49: mod_base = OTHER; note = 2'-O-methyl nucleotide
  modified_base 50: mod_base = OTHER; note = 2'-O-methyl nucleotide
  modified_base 51: mod_base = OTHER; note = 2'-O-methyl nucleotide
  modified_base 52: mod_base = OTHER; note = 2'-O-methyl nucleotide
  modified_base 53: mod_base = OTHER; note = 2'-O-methyl nucleotide
  modified_base 54: mod_base = OTHER; note = 2'-O-methyl nucleotide
  modified_base 55: mod_base = OTHER; note = 2'-O-methyl nucleotide
  modified_base 56: mod_base = OTHER; note = 2'-O-methyl nucleotide
  modified_base 57: mod_base = OTHER; note = 2'-O-methyl nucleotide
  modified_base 58: mod_base = OTHER; note = 2'-O-methyl nucleotide
  modified_base 59: mod_base = OTHER; note = 2'-O-methyl nucleotide
  modified_base 60: mod_base = OTHER; note = 2'-O-methyl nucleotide
  modified_base 61: mod_base = OTHER; note = 2'-O-methyl nucleotide
  modified_base 62: mod_base = OTHER; note = 2'-O-methyl nucleotide
  modified_base 63: mod_base = OTHER; note = 2'-O-methyl nucleotide
  modified_base 64: mod_base = OTHER; note = 2'-O-methyl nucleotide
  modified_base 65: mod_base = OTHER; note = 2'-O-methyl nucleotide
  modified_base 66: mod_base = OTHER; note = 2'-O-methyl nucleotide
  modified_base 67: mod_base = OTHER; note = 2'-O-methyl nucleotide
  modified_base 68: mod_base = OTHER; note = 2'-O-methyl nucleotide
  modified_base 69: mod_base = OTHER; note = 2'-O-methyl nucleotide
  modified_base 70: mod_base = OTHER; note = 2'-O-methyl nucleotide
  modified_base 71: mod_base = OTHER; note = 2'-O-methyl nucleotide
  modified_base 72: mod_base = OTHER; note = 2'-O-methyl nucleotide
  modified_base 73: mod_base = OTHER; note = 2'-O-methyl nucleotide
  modified_base 74: mod_base = OTHER; note = 2'-O-methyl nucleotide
  modified_base 75: mod_base = OTHER; note = 2'-O-methyl nucleotide
  modified_base 76: mod_base = OTHER; note = 2'-O-methyl nucleotide
  modified_base 77: mod_base = OTHER; note = 2'-O-methyl nucleotide, phosphorothioate linkage
  modified_base 78: mod_base = OTHER; note = 2'-O-methyl nucleotide, phosphorothioate linkage
  modified_base 79: mod_base = OTHER; note = 2'-O-methyl nucleotide, phosphorothioate linkage
  modified_base 80: mod_base = OTHER; note = 2'-O-methyl nucleotide
  source 1..80: mol_type = other RNA

SEQ ID NO: 408 - RNA, 80 nt, synthetic construct; identical to SEQ ID NO: 201
  misc_feature 1..80: note = Synthetic
  modified_base 1: mod_base = OTHER; note = 2'-O-methyl nucleotide
  modified_base 2: mod_base = OTHER; note = 2'-fluoro modification
  modified_base 3: mod_base = OTHER; note = 2'-fluoro modification
  modified_base 4: mod_base = OTHER; note = 2'-fluoro modification
  modified_base 5: mod_base = OTHER; note = 2'-fluoro modification
  modified_base 6: mod_base = OTHER; note = 2'-O-methyl nucleotide
  modified_base 9: mod_base = OTHER; note = 2'-O-methyl nucleotide
  modified_base 10: mod_base = OTHER; note = 2'-O-methyl nucleotide
  modified_base 11: mod_base = OTHER; note = 2'-O-methyl nucleotide
  modified_base 12: mod_base = OTHER; note = 2'-O-methyl nucleotide
  modified_base 13: mod_base = OTHER; note = 2'-O-methyl nucleotide
  modified_base 14: mod_base = OTHER; note = 2'-O-methyl nucleotide
  modified_base 15: mod_base = OTHER; note = 2'-O-methyl nucleotide
  modified_base 16: mod_base = OTHER; note = 2'-O-methyl nucleotide
  modified_base 17: mod_base = OTHER; note = 2'-O-methyl nucleotide
  modified_base 18: mod_base = OTHER; note = 2'-O-methyl nucleotide
  modified_base 19: mod_base = OTHER; note = 2'-O-methyl nucleotide
  modified_base 20: mod_base = OTHER; note = 2'-O-methyl nucleotide
  modified_base 49: mod_base = OTHER; note = 2'-O-methyl nucleotide
  modified_base 50: mod_base = OTHER; note = 2'-O-methyl nucleotide
  modified_base 51: mod_base = OTHER; note = 2'-O-methyl nucleotide
  modified_base 52: mod_base = OTHER; note = 2'-O-methyl nucleotide
  modified_base 53: mod_base = OTHER; note = 2'-O-methyl nucleotide
  modified_base 54: mod_base = OTHER; note = 2'-O-methyl nucleotide
  modified_base 55: mod_base = OTHER; note = 2'-O-methyl nucleotide
  modified_base 56: mod_base = OTHER; note = 2'-O-methyl nucleotide
  modified_base 57: mod_base = OTHER; note = 2'-O-methyl nucleotide
  modified_base 58: mod_base = OTHER; note = 2'-O-methyl nucleotide
  modified_base 59: mod_base = OTHER; note = 2'-O-methyl nucleotide
  modified_base 60: mod_base = OTHER; note = 2'-O-methyl nucleotide
  modified_base 61: mod_base = OTHER; note = 2'-O-methyl nucleotide
  modified_base 62: mod_base = OTHER; note = 2'-O-methyl nucleotide
  modified_base 63: mod_base = OTHER; note = 2'-O-methyl nucleotide
  modified_base 64: mod_base = OTHER; note = 2'-O-methyl nucleotide
  modified_base 65: mod_base = OTHER; note = 2'-O-methyl nucleotide
  modified_base 66: mod_base = OTHER; note = 2'-O-methyl nucleotide
  modified_base 67: mod_base = OTHER; note = 2'-O-methyl nucleotide
  modified_base 68: mod_base = OTHER; note = 2'-O-methyl nucleotide
  modified_base 69: mod_base = OTHER; note = 2'-O-methyl nucleotide
  modified_base 70: mod_base = OTHER; note = 2'-O-methyl nucleotide
  modified_base 71: mod_base = OTHER; note = 2'-O-methyl nucleotide
  modified_base 72: mod_base = OTHER; note = 2'-O-methyl nucleotide
  modified_base 73: mod_base = OTHER; note = 2'-O-methyl nucleotide
  modified_base 74: mod_base = OTHER; note = 2'-O-methyl nucleotide
  modified_base 75: mod_base = OTHER; note = 2'-O-methyl nucleotide
  modified_base 76: mod_base = OTHER; note = 2'-O-methyl nucleotide
  modified_base 77: mod_base = OTHER; note = 2'-O-methyl nucleotide, phosphorothioate linkage
  modified_base 78: mod_base = OTHER; note = 2'-O-methyl nucleotide, phosphorothioate linkage
  modified_base 79: mod_base = OTHER; note = 2'-O-methyl nucleotide, phosphorothioate linkage
  modified_base 80: mod_base = OTHER; note = 2'-O-methyl nucleotide
  source 1..80: mol_type = other RNA

SEQ ID NO: 409 - RNA, 80 nt, synthetic construct; identical to SEQ ID NO: 201
  misc_feature 1..80: note = Synthetic
  modified_base 9: mod_base = OTHER; note = 2'-O-methyl nucleotide
  modified_base 10: mod_base = OTHER; note = 2'-O-methyl nucleotide
  modified_base 11: mod_base = OTHER; note = 2'-O-methyl nucleotide
  modified_base 12: mod_base = OTHER; note = 2'-O-methyl nucleotide
  modified_base 13: mod_base = OTHER; note = 2'-O-methyl nucleotide
  modified_base 14: mod_base = OTHER; note = 2'-O-methyl nucleotide
  modified_base 15: mod_base = OTHER; note = 2'-O-methyl nucleotide
  modified_base 16: mod_base = OTHER; note = 2'-O-methyl nucleotide
  modified_base 17: mod_base = OTHER; note = 2'-O-methyl nucleotide
  modified_base 18: mod_base = OTHER; note = 2'-O-methyl nucleotide
  modified_base 19: mod_base = OTHER; note = 2'-O-methyl nucleotide
  modified_base 20: mod_base = OTHER; note = 2'-O-methyl nucleotide
  modified_base 25: mod_base = OTHER; note = 2'-O-methyl nucleotide
  modified_base 26: mod_base = OTHER; note = 2'-O-methyl nucleotide
  modified_base 29: mod_base = OTHER; note = 2'-O-methyl nucleotide
  modified_base 30: mod_base = OTHER; note = 2'-O-methyl nucleotide
  modified_base 49: mod_base = OTHER; note = 2'-O-methyl nucleotide
  modified_base 50: mod_base = OTHER; note = 2'-O-methyl nucleotide
  modified_base 51: mod_base = OTHER; note = 2'-O-methyl nucleotide
  modified_base 52: mod_base = OTHER; note = 2'-O-methyl nucleotide
  modified_base 53: mod_base = OTHER; note = 2'-O-methyl nucleotide
  modified_base 54: mod_base = OTHER; note = 2'-O-methyl nucleotide
  modified_base 55: mod_base = OTHER; note = 2'-O-methyl nucleotide
  modified_base 56: mod_base = OTHER; note = 2'-O-methyl nucleotide
  modified_base 57: mod_base = OTHER; note = 2'-O-methyl nucleotide
  modified_base 58: mod_base = OTHER; note = 2'-O-methyl nucleotide
  modified_base 59: mod_base = OTHER; note = 2'-O-methyl nucleotide
  modified_base 60: mod_base = OTHER; note = 2'-O-methyl nucleotide
  modified_base 61: mod_base = OTHER; note = 2'-O-methyl nucleotide
  modified_base 62: mod_base = OTHER; note = 2'-O-methyl nucleotide
  modified_base 63: mod_base = OTHER; note = 2'-O-methyl nucleotide
  modified_base 64: mod_base = OTHER; note = 2'-O-methyl nucleotide
  modified_base 65: mod_base = OTHER; note = 2'-O-methyl nucleotide
  modified_base 66: mod_base = OTHER; note = 2'-O-methyl nucleotide
  modified_base 67: mod_base = OTHER; note = 2'-O-methyl nucleotide
  modified_base 68: mod_base = OTHER; note = 2'-O-methyl nucleotide
  modified_base 69: mod_base = OTHER; note = 2'-O-methyl nucleotide
  modified_base 70: mod_base = OTHER; note = 2'-O-methyl nucleotide
  modified_base 71: mod_base = OTHER; note = 2'-O-methyl nucleotide
  modified_base 72: mod_base = OTHER; note = 2'-O-methyl nucleotide
  modified_base 73: mod_base = OTHER; note = 2'-O-methyl nucleotide
  modified_base 74: mod_base = OTHER; note = 2'-O-methyl nucleotide
  modified_base 75: mod_base = OTHER; note = 2'-O-methyl nucleotide
  modified_base 76: mod_base = OTHER; note = 2'-O-methyl nucleotide
  modified_base 77: mod_base = OTHER; note = 2'-O-methyl nucleotide, phosphorothioate linkage
  modified_base 78: mod_base = OTHER; note = 2'-O-methyl nucleotide, phosphorothioate linkage
  modified_base 79: mod_base = OTHER; note = 2'-O-methyl nucleotide, phosphorothioate linkage
  modified_base 80: mod_base = OTHER; note = 2'-O-methyl nucleotide
  source 1..80: mol_type = other RNA

SEQ ID NO: 410 - RNA, 80 nt, synthetic construct; identical to SEQ ID NO: 201
  misc_feature 1..80: note = Synthetic
  modified_base 9: mod_base = OTHER; note = 2'-O-methyl nucleotide
  modified_base 10: mod_base = OTHER; note = 2'-O-methyl nucleotide
  modified_base 11: mod_base = OTHER; note = 2'-O-methyl nucleotide
  modified_base 12: mod_base = OTHER; note = 2'-O-methyl nucleotide
  modified_base 13: mod_base = OTHER; note = 2'-O-methyl nucleotide
  modified_base 14: mod_base = OTHER; note = 2'-O-methyl nucleotide
  modified_base 15: mod_base = OTHER; note = 2'-O-methyl nucleotide
  modified_base 16: mod_base = OTHER; note = 2'-O-methyl nucleotide
  modified_base 17: mod_base = OTHER; note = 2'-O-methyl nucleotide
  modified_base 18: mod_base = OTHER; note = 2'-O-methyl nucleotide
  modified_base 19: mod_base = OTHER; note = 2'-O-methyl nucleotide
  modified_base 20: mod_base = OTHER; note = 2'-O-methyl nucleotide
  modified_base 25: mod_base = OTHER; note = 2'-O-methyl nucleotide
  modified_base 26: mod_base = OTHER; note = 2'-O-methyl nucleotide
  modified_base 27: mod_base = OTHER; note = 2'-fluoro modification
  modified_base 28: mod_base = OTHER; note = 2'-fluoro modification
  modified_base 29: mod_base = OTHER; note = 2'-O-methyl nucleotide
  modified_base 30: mod_base = OTHER; note = 2'-O-methyl nucleotide
  modified_base 49: mod_base = OTHER; note = 2'-O-methyl nucleotide
  modified_base 50: mod_base = OTHER; note = 2'-O-methyl nucleotide
  modified_base 51: mod_base = OTHER; note = 2'-O-methyl nucleotide
  modified_base 52: mod_base = OTHER; note = 2'-O-methyl nucleotide
  modified_base 53: mod_base = OTHER; note = 2'-O-methyl nucleotide
  modified_base 54: mod_base = OTHER; note = 2'-O-methyl nucleotide
  modified_base 55: mod_base = OTHER; note = 2'-O-methyl nucleotide
  modified_base 56: mod_base = OTHER; note = 2'-O-methyl nucleotide
  modified_base 57: mod_base = OTHER; note = 2'-O-methyl nucleotide
  modified_base 58: mod_base = OTHER; note = 2'-O-methyl nucleotide
  modified_base 59: mod_base = OTHER; note = 2'-O-methyl nucleotide
  modified_base 60: mod_base = OTHER; note = 2'-O-methyl nucleotide
  modified_base 61: mod_base = OTHER; note = 2'-O-methyl nucleotide
  modified_base 62: mod_base = OTHER; note = 2'-O-methyl nucleotide
  modified_base 63: mod_base = OTHER; note = 2'-O-methyl nucleotide
  modified_base 64: mod_base = OTHER; note = 2'-O-methyl nucleotide
  modified_base 65: mod_base = OTHER; note = 2'-O-methyl nucleotide
  modified_base 66: mod_base = OTHER; note = 2'-O-methyl nucleotide
  modified_base 67: mod_base = OTHER; note = 2'-O-methyl nucleotide
  modified_base 68: mod_base = OTHER; note = 2'-O-methyl nucleotide
  modified_base 69: mod_base = OTHER; note = 2'-O-methyl nucleotide
  modified_base 70: mod_base = OTHER; note = 2'-O-methyl nucleotide
  modified_base 71: mod_base = OTHER; note = 2'-O-methyl nucleotide
  modified_base 72: mod_base = OTHER; note = 2'-O-methyl nucleotide
  modified_base 73: mod_base = OTHER; note = 2'-O-methyl nucleotide
  modified_base 74: mod_base = OTHER; note = 2'-O-methyl nucleotide
  modified_base 75: mod_base = OTHER; note = 2'-O-methyl nucleotide
  modified_base 76: mod_base = OTHER; note = 2'-O-methyl nucleotide
  modified_base 77: mod_base = OTHER; note = 2'-O-methyl nucleotide, phosphorothioate linkage
  modified_base 78: mod_base = OTHER; note = 2'-O-methyl nucleotide, phosphorothioate linkage
  modified_base 79: mod_base = OTHER; note = 2'-O-methyl nucleotide, phosphorothioate linkage
  modified_base 80: mod_base = OTHER; note = 2'-O-methyl nucleotide
  source 1..80: mol_type = other RNA

SEQ ID NO: 411 - RNA, 80 nt, synthetic construct; identical to SEQ ID NO: 201
  misc_feature 1..80: note = Synthetic
  modified_base 9: mod_base = OTHER; note = 2'-O-methyl nucleotide
  modified_base 10: mod_base = OTHER; note = 2'-O-methyl nucleotide
  modified_base 11: mod_base = OTHER; note = 2'-O-methyl nucleotide
  modified_base 12: mod_base = OTHER; note = 2'-O-methyl nucleotide
  modified_base 13: mod_base = OTHER; note = 2'-O-methyl nucleotide
  modified_base 14: mod_base = OTHER; note = 2'-O-methyl nucleotide
  modified_base 15: mod_base = OTHER; note = 2'-O-methyl nucleotide
  modified_base 16: mod_base = OTHER; note = 2'-O-methyl nucleotide
  modified_base 17: mod_base = OTHER; note = 2'-O-methyl nucleotide
  modified_base 18: mod_base = OTHER; note = 2'-O-methyl nucleotide
  modified_base 19: mod_base = OTHER; note = 2'-O-methyl nucleotide
  modified_base 20: mod_base = OTHER; note = 2'-O-methyl nucleotide
  modified_base 25: mod_base = OTHER; note = 2'-fluoro modification
  modified_base 26: mod_base = OTHER; note = 2'-O-methyl nucleotide
  modified_base 27: mod_base = OTHER; note = 2'-fluoro modification
  modified_base 28: mod_base = OTHER; note = 2'-O-methyl nucleotide
  modified_base 29: mod_base = OTHER; note = 2'-fluoro modification
  modified_base 30: mod_base = OTHER; note = 2'-O-methyl nucleotide
  modified_base 49: mod_base = OTHER; note = 2'-O-methyl nucleotide
  modified_base 50: mod_base = OTHER; note = 2'-O-methyl nucleotide
  modified_base 51: mod_base = OTHER; note = 2'-O-methyl nucleotide
  modified_base 52: mod_base = OTHER; note = 2'-O-methyl nucleotide
  modified_base 53: mod_base = OTHER; note = 2'-O-methyl nucleotide
  modified_base 54: mod_base = OTHER; note = 2'-O-methyl nucleotide
  modified_base 55: mod_base = OTHER; note = 2'-O-methyl nucleotide
  modified_base 56: mod_base = OTHER; note = 2'-O-methyl nucleotide
  modified_base 57: mod_base = OTHER; note = 2'-O-methyl nucleotide
  modified_base 58: mod_base = OTHER; note = 2'-O-methyl nucleotide
  modified_base 59: mod_base = OTHER; note = 2'-O-methyl nucleotide
  modified_base 60: mod_base = OTHER; note = 2'-O-methyl nucleotide
  modified_base 61: mod_base = OTHER; note = 2'-O-methyl nucleotide
  modified_base 62: mod_base = OTHER; note = 2'-O-methyl nucleotide
  modified_base 63: mod_base = OTHER; note = 2'-O-methyl nucleotide
  modified_base 64: mod_base = OTHER; note = 2'-O-methyl nucleotide
  modified_base 65: mod_base = OTHER; note = 2'-O-methyl nucleotide
  modified_base 66: mod_base = OTHER; note = 2'-O-methyl nucleotide
  modified_base 67: mod_base = OTHER; note = 2'-O-methyl nucleotide
  modified_base 68: mod_base = OTHER; note = 2'-O-methyl nucleotide
  modified_base 69: mod_base = OTHER; note = 2'-O-methyl nucleotide
  modified_base 70: mod_base = OTHER; note = 2'-O-methyl nucleotide
  modified_base 71: mod_base = OTHER; note = 2'-O-methyl nucleotide
  modified_base 72: mod_base = OTHER; note = 2'-O-methyl nucleotide
  modified_base 73: mod_base = OTHER; note = 2'-O-methyl nucleotide
  modified_base 74: mod_base = OTHER; note = 2'-O-methyl nucleotide
  modified_base 75: mod_base = OTHER; note = 2'-O-methyl nucleotide
  modified_base 76: mod_base = OTHER; note = 2'-O-methyl nucleotide
  modified_base 77: mod_base = OTHER; note = 2'-O-methyl nucleotide, phosphorothioate linkage
  modified_base 78: mod_base = OTHER; note = 2'-O-methyl nucleotide, phosphorothioate linkage
  modified_base 79: mod_base = OTHER; note = 2'-O-methyl nucleotide, phosphorothioate linkage
  modified_base 80: mod_base = OTHER; note = 2'-O-methyl nucleotide
  source 1..80: mol_type = other RNA

SEQ ID NO: 412 - RNA, 80 nt, synthetic construct; identical to SEQ ID NO: 201
  misc_feature 1..80: note = Synthetic
  modified_base 1: mod_base = OTHER; note = 2'-O-methyl nucleotide
  modified_base 6: mod_base = OTHER; note = 2'-O-methyl nucleotide
  modified_base 9: mod_base = OTHER; note = 2'-O-methyl nucleotide
  modified_base 10: mod_base = OTHER; note = 2'-O-methyl nucleotide
  modified_base 11: mod_base = OTHER; note = 2'-O-methyl nucleotide
  modified_base 12: mod_base = OTHER; note = 2'-O-methyl nucleotide
  modified_base 13: mod_base = OTHER; note = 2'-O-methyl nucleotide
  modified_base 14: mod_base = OTHER; note = 2'-O-methyl nucleotide
  modified_base 15: mod_base = OTHER; note = 2'-O-methyl nucleotide
  modified_base 16: mod_base = OTHER; note = 2'-O-methyl nucleotide
  modified_base 17: mod_base = OTHER; note = 2'-O-methyl nucleotide
  modified_base 18: mod_base = OTHER; note = 2'-O-methyl nucleotide
  modified_base 19: mod_base = OTHER; note = 2'-O-methyl nucleotide
  modified_base 20: mod_base = OTHER; note = 2'-O-methyl nucleotide
  modified_base 25: mod_base = OTHER; note = 2'-O-methyl nucleotide
  modified_base 26: mod_base = OTHER; note = 2'-O-methyl nucleotide
  modified_base 29: mod_base = OTHER; note = 2'-O-methyl nucleotide
  modified_base 30: mod_base = OTHER; note = 2'-O-methyl nucleotide
  modified_base 49: mod_base = OTHER; note = 2'-O-methyl nucleotide
  modified_base 50: mod_base = OTHER; note = 2'-O-methyl nucleotide
  modified_base 51: mod_base = OTHER; note = 2'-O-methyl nucleotide
  modified_base 52: mod_base = OTHER; note = 2'-O-methyl nucleotide
  modified_base 53: mod_base = OTHER; note = 2'-O-methyl nucleotide
  modified_base 54: mod_base = OTHER; note = 2'-O-methyl nucleotide
  modified_base 55: mod_base = OTHER; note = 2'-O-methyl nucleotide
  modified_base 56: mod_base = OTHER; note = 2'-O-methyl nucleotide
  modified_base 57: mod_base = OTHER; note = 2'-O-methyl nucleotide
  modified_base 58: mod_base = OTHER; note = 2'-O-methyl nucleotide
  modified_base 59: mod_base = OTHER; note = 2'-O-methyl nucleotide
  modified_base 60: mod_base = OTHER; note = 2'-O-methyl nucleotide
  modified_base 61: mod_base = OTHER; note = 2'-O-methyl nucleotide
  modified_base 62: mod_base = OTHER; note = 2'-O-methyl nucleotide
  modified_base 63: mod_base = OTHER; note = 2'-O-methyl nucleotide
  modified_base 64: mod_base = OTHER; note = 2'-O-methyl nucleotide
  modified_base 65: mod_base = OTHER; note = 2'-O-methyl nucleotide
  modified_base 66: mod_base = OTHER; note = 2'-O-methyl nucleotide
  modified_base 67: mod_base = OTHER; note = 2'-O-methyl nucleotide
  modified_base 68: mod_base = OTHER; note = 2'-O-methyl nucleotide
  modified_base 69: mod_base = OTHER; note = 2'-O-methyl nucleotide
  modified_base 70: mod_base = OTHER; note = 2'-O-methyl nucleotide
  modified_base 71: mod_base = OTHER; note = 2'-O-methyl nucleotide
  modified_base 72: mod_base = OTHER; note = 2'-O-methyl nucleotide
  modified_base 73: mod_base = OTHER; note = 2'-O-methyl nucleotide
  modified_base 74: mod_base = OTHER; note = 2'-O-methyl nucleotide
  modified_base 75: mod_base = OTHER; note = 2'-O-methyl nucleotide
  modified_base 76: mod_base = OTHER; note = 2'-O-methyl nucleotide
  modified_base 77: mod_base = OTHER; note = 2'-O-methyl nucleotide, phosphorothioate linkage
  modified_base 78: mod_base = OTHER; note = 2'-O-methyl nucleotide, phosphorothioate linkage
  modified_base 79: mod_base = OTHER; note = 2'-O-methyl nucleotide, phosphorothioate linkage
  modified_base 80: mod_base = OTHER; note = 2'-O-methyl nucleotide
  source 1..80: mol_type = other RNA

SEQ ID NO: 413 - RNA, 80 nt, synthetic construct; identical to SEQ ID NO: 201
  misc_feature 1..80: note = Synthetic
  modified_base 1: mod_base = OTHER; note = 2'-O-methyl nucleotide
  modified_base 6: mod_base = OTHER; note = 2'-O-methyl nucleotide
  modified_base 9: mod_base = OTHER; note = 2'-O-methyl nucleotide
  modified_base 10: mod_base = OTHER; note = 2'-O-methyl nucleotide
  modified_base 11: mod_base = OTHER; note = 2'-O-methyl nucleotide
  modified_base 12: mod_base = OTHER; note = 2'-O-methyl nucleotide
  modified_base 13: mod_base = OTHER; note = 2'-O-methyl nucleotide
  modified_base 14: mod_base = OTHER; note = 2'-O-methyl nucleotide
  modified_base 15: mod_base = OTHER; note = 2'-O-methyl nucleotide
  modified_base 16: mod_base = OTHER; note = 2'-O-methyl nucleotide
  modified_base 17: mod_base = OTHER; note = 2'-O-methyl nucleotide
  modified_base 18: mod_base = OTHER; note = 2'-O-methyl nucleotide
  modified_base 19: mod_base = OTHER; note = 2'-O-methyl nucleotide
  modified_base 20: mod_base = OTHER; note = 2'-O-methyl nucleotide
  modified_base 25: mod_base = OTHER; note = 2'-O-methyl nucleotide
  modified_base 26: mod_base = OTHER; note = 2'-O-methyl nucleotide
  modified_base 27: mod_base = OTHER; note = 2'-fluoro modification
  modified_base 28: mod_base = OTHER; note = 2'-fluoro modification
  modified_base 29: mod_base = OTHER; note = 2'-O-methyl nucleotide
  modified_base 30: mod_base = OTHER; note = 2'-O-methyl nucleotide
  modified_base 49: mod_base = OTHER; note = 2'-O-methyl nucleotide
  modified_base 50: mod_base = OTHER; note = 2'-O-methyl nucleotide
  modified_base 51: mod_base = OTHER; note = 2'-O-methyl nucleotide
  modified_base 52: mod_base = OTHER; note = 2'-O-methyl nucleotide
  modified_base 53: mod_base = OTHER; note = 2'-O-methyl nucleotide
  modified_base 54: mod_base = OTHER; note = 2'-O-methyl nucleotide
  modified_base 55: mod_base = OTHER; note = 2'-O-methyl nucleotide
  modified_base 56: mod_base = OTHER; note = 2'-O-methyl nucleotide
  modified_base 57: mod_base = OTHER; note = 2'-O-methyl nucleotide
  modified_base 58: mod_base = OTHER; note = 2'-O-methyl nucleotide
  modified_base 59: mod_base = OTHER; note = 2'-O-methyl nucleotide
  modified_base 60: mod_base = OTHER; note = 2'-O-methyl nucleotide
  modified_base 61: mod_base = OTHER; note = 2'-O-methyl nucleotide
  modified_base 62: mod_base = OTHER; note = 2'-O-methyl nucleotide
  modified_base 63: mod_base = OTHER; note = 2'-O-methyl nucleotide
  modified_base 64: mod_base = OTHER; note = 2'-O-methyl nucleotide
  modified_base 65: mod_base = OTHER; note = 2'-O-methyl nucleotide
  modified_base 66: mod_base = OTHER; note = 2'-O-methyl nucleotide
  modified_base 67: mod_base = OTHER; note = 2'-O-methyl nucleotide
  modified_base 68: mod_base = OTHER; note = 2'-O-methyl nucleotide
  modified_base 69: mod_base = OTHER; note = 2'-O-methyl nucleotide
  modified_base 70: mod_base = OTHER; note = 2'-O-methyl nucleotide
  modified_base 71: mod_base = OTHER; note = 2'-O-methyl nucleotide
  modified_base 72: mod_base = OTHER; note = 2'-O-methyl nucleotide
  modified_base 73: mod_base = OTHER; note = 2'-O-methyl nucleotide
  modified_base 74: mod_base = OTHER; note = 2'-O-methyl nucleotide
  modified_base 75: mod_base = OTHER; note = 2'-O-methyl nucleotide
  modified_base 76: mod_base = OTHER; note = 2'-O-methyl nucleotide
  modified_base 77: mod_base = OTHER; note = 2'-O-methyl nucleotide, phosphorothioate linkage
  modified_base 78: mod_base = OTHER; note = 2'-O-methyl nucleotide, phosphorothioate linkage
  modified_base 79: mod_base = OTHER; note = 2'-O-methyl nucleotide, phosphorothioate linkage
  modified_base 80: mod_base = OTHER; note = 2'-O-methyl nucleotide
  source 1..80: mol_type = other RNA

SEQ ID NO: 414 - RNA, 80 nt, synthetic construct; identical to SEQ ID NO: 201
  misc_feature 1..80: note = Synthetic
  modified_base 1: mod_base = OTHER; note = 2'-O-methyl nucleotide
  modified_base 6: mod_base = OTHER; note = 2'-O-methyl nucleotide
  modified_base 9: mod_base = OTHER; note = 2'-O-methyl nucleotide
  modified_base 10: mod_base = OTHER; note = 2'-O-methyl nucleotide
  modified_base 11: mod_base = OTHER; note = 2'-O-methyl nucleotide
  modified_base 12: mod_base = OTHER; note = 2'-O-methyl nucleotide
  modified_base 13: mod_base = OTHER; note = 2'-O-methyl nucleotide
  modified_base 14: mod_base = OTHER; note = 2'-O-methyl nucleotide
  modified_base 15: mod_base = OTHER; note = 2'-O-methyl nucleotide
  modified_base 16: mod_base = OTHER; note = 2'-O-methyl nucleotide
  modified_base 17: mod_base = OTHER; note = 2'-O-methyl nucleotide
  modified_base 18: mod_base = OTHER; note = 2'-O-methyl nucleotide
  modified_base 19: mod_base = OTHER; note = 2'-O-methyl nucleotide
  modified_base 20: mod_base = OTHER; note = 2'-O-methyl nucleotide
  modified_base 25: mod_base = OTHER; note = 2'-fluoro modification
  modified_base 26: mod_base = OTHER; note = 2'-O-methyl nucleotide
  modified_base 27: mod_base = OTHER; note = 2'-fluoro modification
  modified_base 28: mod_base = OTHER; note = 2'-O-methyl nucleotide
  modified_base 29: mod_base = OTHER; note = 2'-fluoro modification
  modified_base 30: mod_base = OTHER; note = 2'-O-methyl nucleotide
  modified_base 49: mod_base = OTHER; note = 2'-O-methyl nucleotide
  modified_base 50: mod_base = OTHER; note = 2'-O-methyl nucleotide
  modified_base 51: mod_base = OTHER; note = 2'-O-methyl nucleotide
  modified_base 52: mod_base = OTHER; note = 2'-O-methyl nucleotide
  modified_base 53: mod_base = OTHER; note = 2'-O-methyl nucleotide
  modified_base 54: mod_base = OTHER; note = 2'-O-methyl nucleotide
  modified_base 55: mod_base = OTHER; note = 2'-O-methyl nucleotide
  modified_base 56: mod_base = OTHER; note = 2'-O-methyl nucleotide
  modified_base 57: mod_base = OTHER; note = 2'-O-methyl nucleotide
  modified_base 58: mod_base = OTHER; note = 2'-O-methyl nucleotide
  modified_base 59: mod_base = OTHER; note = 2'-O-methyl nucleotide
  modified_base 60: mod_base = OTHER; note = 2'-O-methyl nucleotide
  modified_base 61: mod_base = OTHER; note = 2'-O-methyl nucleotide
  modified_base 62: mod_base = OTHER; note = 2'-O-methyl nucleotide
  modified_base 63: mod_base = OTHER; note = 2'-O-methyl nucleotide
  modified_base 64: mod_base = OTHER; note = 2'-O-methyl nucleotide
  modified_base 65: mod_base = OTHER; note = 2'-O-methyl nucleotide
  modified_base 66: mod_base = OTHER; note = 2'-O-methyl nucleotide
  modified_base 67: mod_base = OTHER; note = 2'-O-methyl nucleotide
  modified_base 68: mod_base = OTHER; note = 2'-O-methyl nucleotide
  modified_base 69: mod_base = OTHER; note = 2'-O-methyl nucleotide
  modified_base 70: mod_base = OTHER; note = 2'-O-methyl nucleotide
  modified_base 71: mod_base = OTHER; note = 2'-O-methyl nucleotide
  modified_base 72: mod_base = OTHER; note = 2'-O-methyl nucleotide
  modified_base 73: mod_base = OTHER; note = 2'-O-methyl nucleotide
  modified_base 74: mod_base = OTHER; note = 2'-O-methyl nucleotide
  modified_base 75: mod_base = OTHER; note = 2'-O-methyl nucleotide
  modified_base 76: mod_base = OTHER; note = 2'-O-methyl nucleotide
  modified_base 77: mod_base = OTHER; note = 2'-O-methyl nucleotide, phosphorothioate linkage
  modified_base 78: mod_base = OTHER; note = 2'-O-methyl nucleotide, phosphorothioate linkage
  modified_base 79: mod_base = OTHER; note = 2'-O-methyl nucleotide, phosphorothioate linkage
  modified_base 80: mod_base = OTHER; note = 2'-O-methyl nucleotide
  source 1..80: mol_type = other RNA

SEQ ID NO: 415 - RNA, 80 nt, synthetic construct; identical to SEQ ID NO: 201
  misc_feature 1..80: note = Synthetic
  modified_base 1: mod_base = OTHER; note = 2'-fluoro modification
  modified_base 2: mod_base = OTHER; note = 2'-fluoro modification
  modified_base 3: mod_base = OTHER; note = 2'-fluoro modification
  modified_base 4: mod_base = OTHER; note = 2'-fluoro modification
  modified_base 5: mod_base = OTHER; note = 2'-fluoro modification
  modified_base 6: mod_base = OTHER; note = 2'-fluoro modification
  modified_base 9: mod_base = OTHER; note = 2'-O-methyl nucleotide
  modified_base 10: mod_base = OTHER; note = 2'-O-methyl nucleotide
  modified_base 11: mod_base = OTHER; note = 2'-O-methyl nucleotide
  modified_base 12: mod_base = OTHER; note = 2'-O-methyl nucleotide
  modified_base 13: mod_base = OTHER; note = 2'-O-methyl nucleotide
  modified_base 14: mod_base = OTHER; note = 2'-O-methyl nucleotide
  modified_base 15: mod_base = OTHER; note = 2'-O-methyl nucleotide
  modified_base 16: mod_base = OTHER; note = 2'-O-methyl nucleotide
  modified_base 17: mod_base = OTHER; note = 2'-O-methyl nucleotide
  modified_base 18: mod_base = OTHER; note = 2'-O-methyl nucleotide
  modified_base 19: mod_base = OTHER; note = 2'-O-methyl nucleotide
  modified_base 20: mod_base = OTHER; note = 2'-O-methyl nucleotide
  modified_base 25: mod_base = OTHER; note = 2'-O-methyl nucleotide
  modified_base 26: mod_base = OTHER; note = 2'-O-methyl nucleotide
  modified_base 29: mod_base = OTHER; note = 2'-O-methyl nucleotide
  modified_base 30: mod_base = OTHER; note = 2'-O-methyl nucleotide
  modified_base 49: mod_base = OTHER; note = 2'-O-methyl nucleotide
  modified_base 50: mod_base = OTHER; note = 2'-O-methyl nucleotide
  modified_base 51: mod_base = OTHER; note = 2'-O-methyl nucleotide
  modified_base 52: mod_base = OTHER; note = 2'-O-methyl nucleotide
  modified_base 53: mod_base = OTHER; note = 2'-O-methyl nucleotide
  modified_base 54: mod_base = OTHER; note = 2'-O-methyl nucleotide
  modified_base 55: mod_base = OTHER; note = 2'-O-methyl nucleotide
  modified_base 56: mod_base = OTHER; note = 2'-O-methyl nucleotide
  modified_base 57: mod_base = OTHER; note = 2'-O-methyl nucleotide
  modified_base 58: mod_base = OTHER; note = 2'-O-methyl nucleotide
  modified_base 59: mod_base = OTHER; note = 2'-O-methyl nucleotide
  modified_base 60: mod_base = OTHER; note = 2'-O-methyl nucleotide
  modified_base 61: mod_base = OTHER; note = 2'-O-methyl nucleotide
  modified_base 62: mod_base = OTHER; note = 2'-O-methyl nucleotide
  modified_base 63: mod_base = OTHER; note = 2'-O-methyl nucleotide
  modified_base 64: mod_base = OTHER; note = 2'-O-methyl nucleotide
  modified_base 65: mod_base = OTHER; note = 2'-O-methyl nucleotide
  modified_base 66: mod_base = OTHER; note = 2'-O-methyl nucleotide
  modified_base 67: mod_base = OTHER; note = 2'-O-methyl nucleotide
  modified_base 68: mod_base = OTHER; note = 2'-O-methyl nucleotide
  modified_base 69: mod_base = OTHER; note = 2'-O-methyl nucleotide
  modified_base 70: mod_base = OTHER; note = 2'-O-methyl nucleotide
  modified_base 71: mod_base = OTHER; note = 2'-O-methyl nucleotide
  modified_base 72: mod_base = OTHER; note = 2'-O-methyl nucleotide
  modified_base 73: mod_base = OTHER; note = 2'-O-methyl nucleotide
  modified_base 74: mod_base = OTHER; note = 2'-O-methyl nucleotide
  modified_base 75: mod_base = OTHER; note = 2'-O-methyl nucleotide
  modified_base 76: mod_base = OTHER; note = 2'-O-methyl nucleotide
  modified_base 77: mod_base = OTHER; note = 2'-O-methyl nucleotide, phosphorothioate linkage
  modified_base 78: mod_base = OTHER; note = 2'-O-methyl nucleotide, phosphorothioate linkage
  modified_base 79: mod_base = OTHER; note = 2'-O-methyl nucleotide, phosphorothioate linkage
  modified_base 80: mod_base = OTHER; note = 2'-O-methyl nucleotide
  source 1..80: mol_type = other RNA

SEQ ID NO: 416 - RNA, 80 nt, synthetic construct; identical to SEQ ID NO: 201
  misc_feature 1..80: note = Synthetic
  modified_base 1: mod_base = OTHER; note = 2'-fluoro modification
  modified_base 2: mod_base = OTHER; note = 2'-fluoro modification
  modified_base 3: mod_base = OTHER; note = 2'-fluoro modification
  modified_base 4: mod_base = OTHER; note = 2'-fluoro modification
  modified_base 5: mod_base = OTHER; note = 2'-fluoro modification
  modified_base 6: mod_base = OTHER; note = 2'-fluoro modification
  modified_base 9: mod_base = OTHER; note = 2'-O-methyl nucleotide
  modified_base 10: mod_base = OTHER; note = 2'-O-methyl nucleotide
  modified_base 11: mod_base = OTHER; note = 2'-O-methyl nucleotide
  modified_base 12: mod_base = OTHER; note = 2'-O-methyl nucleotide
  modified_base 13: mod_base = OTHER; note = 2'-O-methyl nucleotide
  modified_base 14: mod_base = OTHER; note = 2'-O-methyl nucleotide
  modified_base 15: mod_base = OTHER; note = 2'-O-methyl nucleotide
  modified_base 16: mod_base = OTHER; note = 2'-O-methyl nucleotide
  modified_base 17: mod_base = OTHER; note = 2'-O-methyl nucleotide
  modified_base 18: mod_base = OTHER; note = 2'-O-methyl nucleotide
  modified_base 19: mod_base = OTHER; note = 2'-O-methyl nucleotide
  modified_base 20: mod_base = OTHER; note = 2'-O-methyl nucleotide
  modified_base 25: mod_base = OTHER; note = 2'-O-methyl nucleotide
  modified_base 26: mod_base = OTHER; note = 2'-O-methyl nucleotide
  modified_base 27: mod_base = OTHER; note = 2'-fluoro modification
  modified_base 28: mod_base = OTHER; note = 2'-fluoro modification
  modified_base 29: mod_base = OTHER; note = 2'-O-methyl nucleotide
  modified_base 30: mod_base = OTHER; note = 2'-O-methyl nucleotide
  modified_base 49: mod_base = OTHER; note = 2'-O-methyl nucleotide
  modified_base 50: mod_base = OTHER; note = 2'-O-methyl nucleotide
  modified_base 51: mod_base = OTHER; note = 2'-O-methyl nucleotide
  modified_base 52: mod_base = OTHER; note = 2'-O-methyl nucleotide
  modified_base 53: mod_base = OTHER; note = 2'-O-methyl nucleotide
  modified_base 54: mod_base = OTHER; note = 2'-O-methyl nucleotide
  modified_base 55: mod_base = OTHER; note = 2'-O-methyl nucleotide
  modified_base 56: mod_base = OTHER; note = 2'-O-methyl nucleotide
  modified_base 57: mod_base = OTHER; note = 2'-O-methyl nucleotide
  modified_base 58: mod_base = OTHER; note = 2'-O-methyl nucleotide
  modified_base 59: mod_base = OTHER; note = 2'-O-methyl nucleotide
  modified_base 60: mod_base = OTHER; note = 2'-O-methyl nucleotide
  modified_base 61: mod_base = OTHER; note = 2'-O-methyl nucleotide
  modified_base 62: mod_base = OTHER; note = 2'-O-methyl nucleotide
  modified_base 63: mod_base = OTHER; note = 2'-O-methyl nucleotide
  modified_base 64: mod_base = OTHER; note = 2'-O-methyl nucleotide
  modified_base 65: mod_base = OTHER; note = 2'-O-methyl nucleotide
  modified_base 66: mod_base = OTHER; note = 2'-O-methyl nucleotide
  modified_base 67: mod_base = OTHER; note = 2'-O-methyl nucleotide
  modified_base 68: mod_base = OTHER; note = 2'-O-methyl nucleotide
  modified_base 69: mod_base = OTHER; note = 2'-O-methyl nucleotide
  modified_base 70: mod_base = OTHER; note = 2'-O-methyl nucleotide
  modified_base 71: mod_base = OTHER; note = 2'-O-methyl nucleotide
  modified_base 72: mod_base = OTHER; note = 2'-O-methyl nucleotide
  modified_base 73: mod_base = OTHER; note = 2'-O-methyl nucleotide
  modified_base 74: mod_base = OTHER; note = 2'-O-methyl nucleotide
  modified_base 75: mod_base = OTHER; note = 2'-O-methyl nucleotide
  modified_base 76: mod_base = OTHER; note = 2'-O-methyl nucleotide
  modified_base 77: mod_base = OTHER; note = 2'-O-methyl nucleotide, phosphorothioate linkage
  modified_base 78: mod_base = OTHER; note = 2'-O-methyl nucleotide, phosphorothioate linkage
  modified_base 79: mod_base = OTHER; note = 2'-O-methyl nucleotide, phosphorothioate linkage
  modified_base 80: mod_base = OTHER; note = 2'-O-methyl nucleotide
  source 1..80: mol_type = other RNA

SEQ ID NO: 417 - RNA, 80 nt, synthetic construct; identical to SEQ ID NO: 201
  misc_feature 1..80: note = Synthetic
  modified_base 1: mod_base = OTHER; note = 2'-fluoro modification
  modified_base 2: mod_base = OTHER; note = 2'-fluoro modification
  modified_base 3: mod_base = OTHER; note = 2'-fluoro modification
  modified_base 4: mod_base = OTHER; note = 2'-fluoro modification
  modified_base 5: mod_base = OTHER; note = 2'-fluoro modification
  modified_base 6: mod_base = OTHER; note = 2'-fluoro modification
  modified_base 9: mod_base = OTHER; note = 2'-O-methyl nucleotide
  modified_base 10: mod_base = OTHER; note = 2'-O-methyl nucleotide
  modified_base 11: mod_base = OTHER; note = 2'-O-methyl nucleotide
  modified_base 12: mod_base = OTHER; note = 2'-O-methyl nucleotide
  modified_base 13: mod_base = OTHER; note = 2'-O-methyl nucleotide
  modified_base 14: mod_base = OTHER; note = 2'-O-methyl nucleotide
  modified_base 15: mod_base = OTHER; note = 2'-O-methyl nucleotide
  modified_base 16: mod_base = OTHER; note = 2'-O-methyl nucleotide
  modified_base 17: mod_base = OTHER; note = 2'-O-methyl nucleotide
  modified_base 18: mod_base = OTHER; note = 2'-O-methyl nucleotide
  modified_base 19: mod_base = OTHER; note = 2'-O-methyl nucleotide
  modified_base 20: mod_base = OTHER; note = 2'-O-methyl nucleotide
  modified_base 25: mod_base = OTHER; note = 2'-fluoro modification
  modified_base 26: mod_base = OTHER; note = 2'-O-methyl nucleotide
  modified_base 27: mod_base = OTHER; note = 2'-fluoro modification
  modified_base 28: mod_base = OTHER; note = 2'-O-methyl nucleotide
  modified_base 29: mod_base = OTHER; note = 2'-fluoro modification
  modified_base 30: mod_base = OTHER; note = 2'-O-methyl nucleotide
  modified_base 49: mod_base = OTHER; note = 2'-O-methyl nucleotide
  modified_base 50: mod_base = OTHER; note = 2'-O-methyl nucleotide
  modified_base 51: mod_base = OTHER; note = 2'-O-methyl nucleotide
  modified_base 52: mod_base = OTHER; note = 2'-O-methyl nucleotide
  modified_base 53: mod_base = OTHER; note = 2'-O-methyl nucleotide
  modified_base 54: mod_base = OTHER; note = 2'-O-methyl nucleotide
  modified_base 55: mod_base = OTHER; note = 2'-O-methyl nucleotide
  modified_base 56: mod_base = OTHER; note = 2'-O-methyl nucleotide
  modified_base 57: mod_base = OTHER; note = 2'-O-methyl nucleotide
  modified_base 58: mod_base = OTHER; note = 2'-O-methyl nucleotide
  modified_base 59: mod_base = OTHER; note = 2'-O-methyl nucleotide
  modified_base 60: mod_base = OTHER; note = 2'-O-methyl nucleotide
  modified_base 61: mod_base = OTHER; note = 2'-O-methyl nucleotide
  modified_base 62: mod_base = OTHER; note = 2'-O-methyl nucleotide
  modified_base 63: mod_base = OTHER; note = 2'-O-methyl nucleotide
  modified_base 64: mod_base = OTHER; note = 2'-O-methyl nucleotide
  modified_base 65: mod_base = OTHER; note = 2'-O-methyl nucleotide
  modified_base 66: mod_base = OTHER; note = 2'-O-methyl nucleotide
  modified_base 67: mod_base = OTHER; note = 2'-O-methyl nucleotide
  modified_base 68: mod_base = OTHER; note = 2'-O-methyl nucleotide
  modified_base 69: mod_base = OTHER; note = 2'-O-methyl nucleotide
  modified_base 70: mod_base = OTHER; note = 2'-O-methyl nucleotide
  modified_base 71: mod_base = OTHER; note = 2'-O-methyl nucleotide
  modified_base 72: mod_base = OTHER; note = 2'-O-methyl nucleotide
  modified_base 73: mod_base = OTHER; note = 2'-O-methyl nucleotide
  modified_base 74: mod_base = OTHER; note = 2'-O-methyl nucleotide
  modified_base 75: mod_base = OTHER; note = 2'-O-methyl nucleotide
  modified_base 76: mod_base = OTHER; note = 2'-O-methyl nucleotide
  modified_base 77: mod_base = OTHER; note = 2'-O-methyl nucleotide, phosphorothioate linkage
  modified_base 78: mod_base = OTHER; note = 2'-O-methyl nucleotide, phosphorothioate linkage
  modified_base 79: mod_base = OTHER; note = 2'-O-methyl nucleotide, phosphorothioate linkage
  modified_base 80: mod_base = OTHER; note = 2'-O-methyl nucleotide
  source 1..80: mol_type = other RNA

SEQ ID NO: 418 - RNA, 80 nt, synthetic construct; identical to SEQ ID NO: 201
  misc_feature 1..80: note = Synthetic
  modified_base 7: mod_base = OTHER; note = 2'-O-methyl nucleotide
  modified_base 8: mod_base = OTHER; note = 2'-O-methyl nucleotide
  modified_base 9: mod_base = OTHER; note = 2'-O-methyl nucleotide
  modified_base 10: mod_base = OTHER; note = 2'-O-methyl nucleotide
  modified_base 11: mod_base = OTHER; note = 2'-O-methyl nucleotide
  modified_base 12: mod_base = OTHER; note = 2'-O-methyl nucleotide
  modified_base 13: mod_base = OTHER; note = 2'-O-methyl nucleotide
  modified_base 14: mod_base = OTHER; note = 2'-O-methyl nucleotide
  modified_base 15: mod_base = OTHER; note = 2'-O-methyl nucleotide
  modified_base 16: mod_base = OTHER; note = 2'-O-methyl nucleotide
  modified_base 17: mod_base = OTHER; note = 2'-O-methyl nucleotide
  modified_base 18: mod_base = OTHER; note = 2'-O-methyl nucleotide
  modified_base 19: mod_base = OTHER; note = 2'-O-methyl nucleotide
  modified_base 20: mod_base = OTHER; note = 2'-O-methyl nucleotide
  modified_base 49: mod_base = OTHER; note = 2'-O-methyl nucleotide
  modified_base 50: mod_base = OTHER; note = 2'-O-methyl nucleotide
  modified_base 51: mod_base = OTHER; note = 2'-O-methyl nucleotide
  modified_base 52: mod_base = OTHER; note = 2'-O-methyl nucleotide
  modified_base 53: mod_base = OTHER; note = 2'-O-methyl nucleotide
  modified_base 54: mod_base = OTHER; note = 2'-O-methyl nucleotide
  modified_base 55: mod_base = OTHER; note = 2'-O-methyl nucleotide
  modified_base 56: mod_base = OTHER; note = 2'-O-methyl nucleotide
  modified_base 57: mod_base = OTHER; note = 2'-O-methyl nucleotide
  modified_base 58: mod_base = OTHER; note = 2'-O-methyl nucleotide
  modified_base 59: mod_base = OTHER; note = 2'-O-methyl nucleotide
  modified_base 60: mod_base = OTHER; note = 2'-O-methyl nucleotide
  modified_base 61: mod_base = OTHER; note = 2'-O-methyl nucleotide
  modified_base 62: mod_base = OTHER; note = 2'-O-methyl nucleotide
  modified_base 63: mod_base = OTHER; note = 2'-O-methyl nucleotide
  modified_base 64: mod_base = OTHER; note = 2'-O-methyl nucleotide
  modified_base 65: mod_base = OTHER; note = 2'-O-methyl nucleotide
  modified_base 66: mod_base = OTHER; note = 2'-O-methyl nucleotide
  modified_base 67: mod_base = OTHER; note = 2'-O-methyl nucleotide
  modified_base 68: mod_base = OTHER; note = 2'-O-methyl nucleotide
  modified_base 69: mod_base = OTHER; note = 2'-O-methyl nucleotide
  modified_base 70: mod_base = OTHER; note = 2'-O-methyl nucleotide
  modified_base 71: mod_base = OTHER; note = 2'-O-methyl nucleotide
  modified_base 72: mod_base = OTHER; note = 2'-O-methyl nucleotide
  modified_base 73: mod_base = OTHER; note = 2'-O-methyl nucleotide
  modified_base 74: mod_base = OTHER; note = 2'-O-methyl nucleotide
  modified_base 75: mod_base = OTHER; note = 2'-O-methyl nucleotide
  modified_base 76: mod_base = OTHER; note = 2'-O-methyl nucleotide
  modified_base 77: mod_base = OTHER; note = 2'-O-methyl nucleotide, phosphorothioate linkage
  modified_base 78: mod_base = OTHER; note = 2'-O-methyl nucleotide, phosphorothioate linkage
  modified_base 79: mod_base = OTHER; note = 2'-O-methyl nucleotide, phosphorothioate linkage
  modified_base 80: mod_base = OTHER; note = 2'-O-methyl nucleotide
  source 1..80: mol_type = other RNA

SEQ ID NO: 419 - RNA, 80 nt, synthetic construct; identical to SEQ ID NO: 201
  misc_feature 1..80: note = Synthetic
  modified_base 9: mod_base = OTHER; note = 2'-O-methyl nucleotide
  modified_base 10: mod_base = OTHER; note = 2'-O-methyl nucleotide
  modified_base 11: mod_base = OTHER; note = 2'-O-methyl nucleotide
  modified_base 12: mod_base = OTHER; note = 2'-O-methyl nucleotide
  modified_base 13: mod_base = OTHER; note = 2'-O-methyl nucleotide
  modified_base 14: mod_base = OTHER; note = 2'-O-methyl nucleotide
  modified_base 15: mod_base = OTHER; note = 2'-O-methyl nucleotide
  modified_base 16: mod_base = OTHER; note = 2'-O-methyl nucleotide
  modified_base 17: mod_base = OTHER; note = 2'-O-methyl nucleotide
  modified_base 18: mod_base = OTHER; note = 2'-O-methyl nucleotide
  modified_base 19: mod_base = OTHER; note = 2'-O-methyl nucleotide
  modified_base 20: mod_base = OTHER; note = 2'-O-methyl nucleotide
  modified_base 21: mod_base = OTHER; note = 2'-O-methyl nucleotide
  modified_base 22: mod_base = OTHER; note = 2'-O-methyl nucleotide
  modified_base 23: mod_base = OTHER; note = 2'-O-methyl nucleotide
  modified_base 24: mod_base = OTHER; note = 2'-O-methyl nucleotide
  modified_base 49: mod_base = OTHER; note = 2'-O-methyl nucleotide
  modified_base 50: mod_base = OTHER; note = 2'-O-methyl nucleotide
  modified_base 51: mod_base = OTHER; note = 2'-O-methyl nucleotide
  modified_base 52: mod_base = OTHER; note = 2'-O-methyl nucleotide
  modified_base 53: mod_base = OTHER; note = 2'-O-methyl nucleotide
  modified_base 54: mod_base = OTHER; note = 2'-O-methyl nucleotide
  modified_base 55: mod_base = OTHER; note = 2'-O-methyl nucleotide
  modified_base 56: mod_base = OTHER; note = 2'-O-methyl nucleotide
  modified_base 57: mod_base = OTHER; note = 2'-O-methyl nucleotide
  modified_base 58: mod_base = OTHER; note = 2'-O-methyl nucleotide
  modified_base 59: mod_base = OTHER; note = 2'-O-methyl nucleotide
  modified_base 60: mod_base = OTHER; note = 2'-O-methyl nucleotide
  modified_base 61: mod_base = OTHER; note = 2'-O-methyl nucleotide
  modified_base 62: mod_base = OTHER; note = 2'-O-methyl nucleotide
  modified_base 63: mod_base = OTHER; note = 2'-O-methyl nucleotide
  modified_base 64: mod_base = OTHER; note = 2'-O-methyl nucleotide
  modified_base 65: mod_base = OTHER; note = 2'-O-methyl nucleotide
  modified_base 66: mod_base = OTHER; note = 2'-O-methyl nucleotide
  modified_base 67: mod_base = OTHER; note = 2'-O-methyl nucleotide
  modified_base 68: mod_base = OTHER; note = 2'-O-methyl nucleotide
  modified_base 69: mod_base = OTHER; note = 2'-O-methyl nucleotide
  modified_base 70: mod_base = OTHER; note = 2'-O-methyl nucleotide
  modified_base 71: mod_base = OTHER; note = 2'-O-methyl nucleotide
  modified_base 72: mod_base = OTHER; note = 2'-O-methyl nucleotide
  modified_base 73: mod_base = OTHER; note = 2'-O-methyl nucleotide
  modified_base 74: mod_base = OTHER; note = 2'-O-methyl nucleotide
  modified_base 75: mod_base = OTHER; note = 2'-O-methyl nucleotide
  modified_base 76: mod_base = OTHER; note = 2'-O-methyl nucleotide
  modified_base 77: mod_base = OTHER; note = 2'-O-methyl nucleotide, phosphorothioate linkage
  modified_base 78: mod_base = OTHER; note = 2'-O-methyl nucleotide, phosphorothioate linkage
  modified_base 79: mod_base = OTHER; note = 2'-O-methyl nucleotide, phosphorothioate linkage
  modified_base 80: mod_base = OTHER; note = 2'-O-methyl nucleotide
  source 1..80: mol_type = other RNA

SEQ ID NO: 420 - RNA, 80 nt, synthetic construct; identical to SEQ ID NO: 201
  misc_feature 1..80: note = Synthetic
  modified_base 9: mod_base = OTHER; note = 2'-O-methyl nucleotide
  modified_base 10: mod_base = OTHER; note = 2'-O-methyl nucleotide
  modified_base 11: mod_base = OTHER; note = 2'-O-methyl nucleotide
  modified_base 12: mod_base = OTHER; note = 2'-O-methyl nucleotide
  modified_base 13: mod_base = OTHER; note = 2'-O-methyl nucleotide
  modified_base 14: mod_base = OTHER; note = 2'-O-methyl nucleotide
  modified_base 15: mod_base = OTHER; note = 2'-O-methyl nucleotide
  modified_base 16: mod_base = OTHER; note = 2'-O-methyl nucleotide
  modified_base 17: mod_base = OTHER; note = 2'-O-methyl nucleotide
  modified_base 18: mod_base = OTHER; note = 2'-O-methyl nucleotide
  modified_base 19: mod_base = OTHER; note = 2'-O-methyl nucleotide
  modified_base 20: mod_base = OTHER; note = 2'-O-methyl nucleotide
  modified_base 45: mod_base = OTHER; note = 2'-fluoro modification
  modified_base 46: mod_base = OTHER; note = 2'-fluoro modification
  modified_base 47: mod_base = OTHER; note = 2'-fluoro modification
  modified_base 48: mod_base = OTHER; note = 2'-fluoro modification
  modified_base 49: mod_base = OTHER; note = 2'-O-methyl nucleotide
  modified_base 50: mod_base = OTHER; note = 2'-O-methyl nucleotide
  modified_base 51: mod_base = OTHER; note = 2'-O-methyl nucleotide
  modified_base 52: mod_base = OTHER; note = 2'-O-methyl nucleotide
  modified_base 53: mod_base = OTHER; note = 2'-O-methyl nucleotide
  modified_base 54: mod_base = OTHER; note = 2'-O-methyl nucleotide
  modified_base 55: mod_base = OTHER; note = 2'-O-methyl nucleotide
  modified_base 56: mod_base = OTHER; note = 2'-O-methyl nucleotide
  modified_base 57: mod_base = OTHER; note = 2'-O-methyl nucleotide
  modified_base 58: mod_base = OTHER; note = 2'-O-methyl nucleotide
  modified_base 59: mod_base = OTHER; note = 2'-O-methyl nucleotide
  modified_base 60: mod_base = OTHER; note = 2'-O-methyl nucleotide
  modified_base 61: mod_base = OTHER; note = 2'-O-methyl nucleotide
  modified_base 62: mod_base = OTHER; note = 2'-O-methyl nucleotide
  modified_base 63: mod_base = OTHER; note = 2'-O-methyl nucleotide
  modified_base 64: mod_base = OTHER; note = 2'-O-methyl nucleotide
  modified_base 65: mod_base = OTHER; note = 2'-O-methyl nucleotide
  modified_base 66: mod_base = OTHER; note = 2'-O-methyl nucleotide
  modified_base 67: mod_base = OTHER; note = 2'-O-methyl nucleotide
  modified_base 68: mod_base = OTHER; note = 2'-O-methyl nucleotide
  modified_base 69: mod_base = OTHER; note = 2'-O-methyl nucleotide
  modified_base 70: mod_base = OTHER; note = 2'-O-methyl nucleotide
  modified_base 71: mod_base = OTHER; note = 2'-O-methyl nucleotide
  modified_base 72: mod_base = OTHER; note = 2'-O-methyl nucleotide
  modified_base 73: mod_base = OTHER; note = 2'-O-methyl nucleotide
  modified_base 74: mod_base = OTHER; note = 2'-O-methyl nucleotide
  modified_base 75: mod_base = OTHER; note = 2'-O-methyl nucleotide
  modified_base 76: mod_base = OTHER; note = 2'-O-methyl nucleotide
  modified_base 77: mod_base = OTHER; note = 2'-O-methyl nucleotide, phosphorothioate linkage
  modified_base 78: mod_base = OTHER; note = 2'-O-methyl nucleotide, phosphorothioate linkage
  modified_base 79: mod_base = OTHER; note = 2'-O-methyl nucleotide, phosphorothioate linkage
  modified_base 80: mod_base = OTHER; note = 2'-O-methyl nucleotide
  source 1..80: mol_type = other RNA

SEQ ID NO: 421 - RNA, 80 nt, synthetic construct; identical to SEQ ID NO: 201
  misc_feature 1..80: note = Synthetic
  modified_base 9: mod_base = OTHER; note = 2'-O-methyl nucleotide
  modified_base 10: mod_base = OTHER; note = 2'-O-methyl nucleotide
  modified_base 11: mod_base = OTHER; note = 2'-O-methyl nucleotide
  modified_base 12: mod_base = OTHER; note = 2'-O-methyl nucleotide
  modified_base 13: mod_base = OTHER; note = 2'-O-methyl nucleotide
  modified_base 14: mod_base = OTHER; note = 2'-O-methyl nucleotide
  modified_base 15: mod_base = OTHER; note = 2'-O-methyl nucleotide
  modified_base 16: mod_base = OTHER; note = 2'-O-methyl nucleotide
  modified_base 17: mod_base = OTHER; note = 2'-O-methyl nucleotide
  modified_base 18: mod_base = OTHER; note = 2'-O-methyl nucleotide
  modified_base 19: mod_base = OTHER; note = 2'-O-methyl nucleotide
  modified_base 20: mod_base = OTHER; note = 2'-O-methyl nucleotide
  modified_base 46: mod_base = OTHER; note = 2'-O-methyl nucleotide
  modified_base 47: mod_base = OTHER; note = 2'-O-methyl nucleotide
  modified_base 48: mod_base = OTHER; note = 2'-O-methyl nucleotide
  modified_base 49: mod_base = OTHER; note = 2'-O-methyl nucleotide
  modified_base 50: mod_base = OTHER; note = 2'-O-methyl nucleotide
  modified_base 51: mod_base = OTHER; note = 2'-O-methyl nucleotide
  modified_base 52: mod_base = OTHER; note = 2'-O-methyl nucleotide
  modified_base 53: mod_base = OTHER; note = 2'-O-methyl nucleotide
  modified_base 54: mod_base = OTHER; note = 2'-O-methyl nucleotide
  modified_base 55: mod_base = OTHER; note = 2'-O-methyl nucleotide
  modified_base 56: mod_base = OTHER; note = 2'-O-methyl nucleotide
  modified_base 57: mod_base = OTHER; note = 2'-O-methyl nucleotide
  modified_base 58: mod_base = OTHER; note = 2'-O-methyl nucleotide
  modified_base 59: mod_base = OTHER; note = 2'-O-methyl nucleotide
  modified_base 60: mod_base = OTHER; note = 2'-O-methyl nucleotide
  modified_base 61: mod_base = OTHER; note = 2'-O-methyl nucleotide
  modified_base 62: mod_base = OTHER; note = 2'-O-methyl nucleotide
  modified_base 63: mod_base = OTHER; note = 2'-O-methyl nucleotide
  modified_base 64: mod_base = OTHER; note = 2'-O-methyl nucleotide
  modified_base 65: mod_base = OTHER; note = 2'-O-methyl nucleotide
  modified_base 66: mod_base = OTHER; note = 2'-O-methyl nucleotide
  modified_base 67: mod_base = OTHER; note = 2'-O-methyl nucleotide
  modified_base 68: mod_base = OTHER; note = 2'-O-methyl nucleotide
  modified_base 69: mod_base = OTHER; note = 2'-O-methyl nucleotide
  modified_base 70: mod_base = OTHER; note = 2'-O-methyl nucleotide
  modified_base 71: mod_base = OTHER; note = 2'-O-methyl nucleotide
  modified_base 72: mod_base = OTHER; note = 2'-O-methyl nucleotide
  modified_base 73: mod_base = OTHER; note = 2'-O-methyl nucleotide
  modified_base 74: mod_base = OTHER; note = 2'-O-methyl nucleotide
  modified_base 75: mod_base = OTHER; note = 2'-O-methyl nucleotide
  modified_base 76: mod_base = OTHER; note = 2'-O-methyl nucleotide
  modified_base 77: mod_base = OTHER; note = 2'-O-methyl nucleotide, phosphorothioate linkage
  modified_base 78: mod_base = OTHER; note = 2'-O-methyl nucleotide, phosphorothioate linkage
  modified_base 79: mod_base = OTHER; note = 2'-O-methyl nucleotide, phosphorothioate linkage
  modified_base 80: mod_base = OTHER; note = 2'-O-methyl nucleotide
  source 1..80: mol_type = other RNA

SEQ ID NO: 422 - RNA, 80 nt, synthetic construct; identical to SEQ ID NO: 201
  misc_feature 1..80: note = Synthetic
  modified_base 1: mod_base = OTHER; note = 2'-fluoro modification
  modified_base 2: mod_base = OTHER; note = 2'-fluoro modification
  modified_base 3: mod_base = OTHER; note = 2'-fluoro modification
  modified_base 4: mod_base = OTHER; note = 2'-fluoro modification
  modified_base 5: mod_base = OTHER; note = 2'-fluoro modification
  modified_base 6: mod_base = OTHER; note = 2'-fluoro modification
  modified_base 7: mod_base = OTHER; note = 2'-O-methyl nucleotide
  modified_base 8: mod_base = OTHER; note = 2'-O-methyl nucleotide
  modified_base 9: mod_base = OTHER; note = 2'-O-methyl nucleotide
  modified_base 10: mod_base = OTHER; note = 2'-O-methyl nucleotide
  modified_base 11: mod_base = OTHER; note = 2'-O-methyl nucleotide
  modified_base 12: mod_base = OTHER; note = 2'-O-methyl nucleotide
  modified_base 13: mod_base = OTHER; note = 2'-O-methyl nucleotide
  modified_base 14: mod_base = OTHER; note = 2'-O-methyl nucleotide
  modified_base 15: mod_base = OTHER; note = 2'-O-methyl nucleotide
  modified_base 16: mod_base = OTHER; note = 2'-O-methyl nucleotide
  modified_base 17: mod_base = OTHER; note = 2'-O-methyl nucleotide
  modified_base 18: mod_base = OTHER; note = 2'-O-methyl nucleotide
  modified_base 19: mod_base = OTHER; note = 2'-O-methyl nucleotide
  modified_base 20: mod_base = OTHER; note = 2'-O-methyl nucleotide
  modified_base 21: mod_base = OTHER; note = 2'-O-methyl nucleotide
  modified_base 22: mod_base = OTHER; note = 2'-O-methyl nucleotide
  modified_base 23: mod_base = OTHER; note = 2'-O-methyl nucleotide
  modified_base 24: mod_base = OTHER; note = 2'-O-methyl nucleotide
  modified_base 25: mod_base = OTHER; note = 2'-O-methyl nucleotide
  modified_base 26: mod_base = OTHER; note = 2'-O-methyl nucleotide
  modified_base 27: mod_base = OTHER; note = 2'-fluoro modification
  modified_base 28: mod_base = OTHER; note = 2'-fluoro modification
  modified_base 29: mod_base = OTHER; note = 2'-O-methyl nucleotide
  modified_base 30: mod_base = OTHER; note = 2'-O-methyl nucleotide
  modified_base 46: mod_base = OTHER; note = 2'-O-methyl nucleotide
  modified_base 47: mod_base = OTHER; note = 2'-O-methyl nucleotide
  modified_base 48: mod_base = OTHER; note = 2'-O-methyl nucleotide
  modified_base 49: mod_base = OTHER; note = 2'-O-methyl nucleotide
  modified_base 50: mod_base = OTHER; note = 2'-O-methyl nucleotide
  modified_base 51: mod_base = OTHER; note = 2'-O-methyl nucleotide
  modified_base 52: mod_base = OTHER; note = 2'-O-methyl nucleotide
  modified_base 53: mod_base = OTHER; note = 2'-O-methyl nucleotide
  modified_base 54: mod_base = OTHER; note = 2'-O-methyl nucleotide
  modified_base 55: mod_base = OTHER; note = 2'-O-methyl nucleotide
  modified_base 56: mod_base = OTHER; note = 2'-O-methyl nucleotide
  modified_base 57: mod_base = OTHER; note = 2'-O-methyl nucleotide
  modified_base 58: mod_base = OTHER; note = 2'-O-methyl nucleotide
  modified_base 59: mod_base = OTHER; note = 2'-O-methyl nucleotide
  modified_base 60: mod_base = OTHER; note = 2'-O-methyl nucleotide
  modified_base 61: mod_base = OTHER; note = 2'-O-methyl nucleotide
  modified_base 62: mod_base = OTHER; note = 2'-O-methyl nucleotide
  modified_base 63: mod_base = OTHER; note = 2'-O-methyl nucleotide
  modified_base 64: mod_base = OTHER; note = 2'-O-methyl nucleotide
  modified_base 65: mod_base = OTHER; note = 2'-O-methyl nucleotide
  modified_base 66: mod_base = OTHER; note = 2'-O-methyl nucleotide
  modified_base 67: mod_base = OTHER; note = 2'-O-methyl nucleotide
  modified_base 68: mod_base = OTHER; note = 2'-O-methyl nucleotide
  modified_base 69: mod_base = OTHER; note = 2'-O-methyl nucleotide
  modified_base 70: mod_base = OTHER; note = 2'-O-methyl nucleotide
  modified_base 71: mod_base = OTHER; note = 2'-O-methyl nucleotide
  modified_base 72: mod_base = OTHER; note = 2'-O-methyl nucleotide
  modified_base 73: mod_base = OTHER; note = 2'-O-methyl nucleotide
  modified_base 74: mod_base = OTHER; note = 2'-O-methyl nucleotide
  modified_base 75: mod_base = OTHER; note = 2'-O-methyl nucleotide
  modified_base 76: mod_base = OTHER; note = 2'-O-methyl nucleotide
  modified_base 77: mod_base = OTHER; note = 2'-O-methyl nucleotide
  modified_base 78: mod_base = OTHER; note = 2'-O-methyl nucleotide
  modified_base 79: mod_base = OTHER; note = 2'-O-methyl nucleotide
  modified_base 80: mod_base = OTHER; note = 2'-O-methyl nucleotide
  source 1..80: mol_type = other RNA

SEQ ID NO: 423 - RNA, 80 nt, synthetic construct; identical to SEQ ID NO: 201
  misc_feature 1..80: note = Synthetic
  modified_base 9: mod_base = OTHER; note = 2'-O-methyl nucleotide
  modified_base 10: mod_base = OTHER; note = 2'-O-methyl nucleotide
  modified_base 11: mod_base = OTHER; note = 2'-O-methyl nucleotide
  modified_base 12: mod_base = OTHER; note = 2'-O-methyl nucleotide
  modified_base 13: mod_base = OTHER; note = 2'-O-methyl nucleotide
  modified_base 14: mod_base = OTHER; note = 2'-O-methyl nucleotide
  modified_base 15: mod_base = OTHER; note = 2'-O-methyl nucleotide
  modified_base 16: mod_base = OTHER; note = 2'-O-methyl nucleotide
  modified_base 17: mod_base = OTHER; note = 2'-O-methyl nucleotide
  modified_base 18: mod_base = OTHER; note = 2'-O-methyl nucleotide
  modified_base 19: mod_base = OTHER; note = 2'-O-methyl nucleotide
  modified_base 20: mod_base = OTHER; note = 2'-O-methyl nucleotide
  modified_base 49: mod_base = OTHER; note = 2'-O-methyl nucleotide
  modified_base 50: mod_base = OTHER; note = 2'-O-methyl nucleotide
  modified_base 51: mod_base = OTHER; note = 2'-O-methyl nucleotide
  modified_base 52: mod_base = OTHER; note = 2'-O-methyl nucleotide
  modified_base 53: mod_base = OTHER; note = 2'-O-methyl nucleotide
  modified_base 54: mod_base = OTHER; note = 2'-O-methyl nucleotide
  modified_base 55: mod_base = OTHER; note = 2'-O-methyl nucleotide
  modified_base 56: mod_base = OTHER; note = 2'-O-methyl nucleotide
  modified_base 57: mod_base = OTHER; note = 2'-O-methyl nucleotide
  modified_base 58: mod_base = OTHER; note = 2'-O-methyl nucleotide
  modified_base 59: mod_base = OTHER; note = 2'-O-methyl nucleotide
  modified_base 60: mod_base = OTHER; note = 2'-O-methyl nucleotide
  modified_base 61: mod_base = OTHER; note = 2'-O-methyl nucleotide
  modified_base 62: mod_base = OTHER; note = 2'-O-methyl nucleotide
  modified_base 63: mod_base = OTHER; note = 2'-O-methyl nucleotide
  modified_base 64: mod_base = OTHER; note = 2'-O-methyl nucleotide
  modified_base 65: mod_base = OTHER; note = 2'-O-methyl nucleotide
  modified_base 66: mod_base = OTHER; note = 2'-O-methyl nucleotide
  modified_base 67: mod_base = OTHER; note = 2'-O-methyl nucleotide
  modified_base 68: mod_base = OTHER; note = 2'-O-methyl nucleotide
  modified_base 69: mod_base = OTHER; note = 2'-O-methyl nucleotide
  modified_base 70: mod_base = OTHER; note = 2'-O-methyl nucleotide
  modified_base 71: mod_base = OTHER; note = 2'-O-methyl nucleotide
  modified_base 72: mod_base = OTHER; note = 2'-O-methyl nucleotide
  modified_base 73: mod_base = OTHER; note = 2'-O-methyl nucleotide
  modified_base 74: mod_base = OTHER; note = 2'-O-methyl nucleotide
  modified_base 75: mod_base = OTHER; note = 2'-O-methyl nucleotide
  modified_base 76: mod_base = OTHER; note = 2'-O-methyl nucleotide
  modified_base 77: mod_base = OTHER; note = 2'-O-methyl nucleotide
  modified_base 78: mod_base = OTHER; note = 2'-O-methyl nucleotide
  modified_base 79: mod_base = OTHER; note = 2'-O-methyl nucleotide
  modified_base 80: mod_base = OTHER; note = 2'-O-methyl nucleotide
  source 1..80: mol_type = other RNA

SEQ ID NO: 424 - RNA, 80 nt, synthetic construct; identical to SEQ ID NO: 201
  misc_feature 1..80: note = Synthetic
  modified_base 9: mod_base = OTHER; note = 2'-O-methyl nucleotide
  modified_base 10: mod_base = OTHER; note = 2'-O-methyl nucleotide
  modified_base 11: mod_base = OTHER; note = 2'-O-methyl nucleotide
  modified_base 12: mod_base = OTHER; note = 2'-O-methyl nucleotide
  modified_base 13: mod_base = OTHER; note = 2'-O-methyl nucleotide
  modified_base 14: mod_base = OTHER; note = 2'-O-methyl nucleotide
  modified_base 15: mod_base = OTHER; note = 2'-O-methyl nucleotide
  modified_base 16: mod_base = OTHER; note = 2'-O-methyl nucleotide
  modified_base 17: mod_base = OTHER; note = 2'-O-methyl nucleotide
  modified_base 18: mod_base = OTHER; note = 2'-O-methyl nucleotide
  modified_base 19: mod_base = OTHER; note = 2'-O-methyl nucleotide
  modified_base 20: mod_base = OTHER; note = 2'-O-methyl nucleotide
  modified_base 49: mod_base = OTHER; note = 2'-O-methyl nucleotide
  modified_base 50: mod_base = OTHER; note = 2'-O-methyl nucleotide
  modified_base 51: mod_base = OTHER; note = 2'-O-methyl nucleotide
  modified_base 52: mod_base = OTHER; note = 2'-O-methyl nucleotide
  modified_base 53: mod_base = OTHER; note = 2'-O-methyl nucleotide
  modified_base 54: mod_base = OTHER; note = 2'-O-methyl nucleotide
  modified_base 55: mod_base = OTHER; note = 2'-O-methyl nucleotide
  modified_base 56: mod_base = OTHER; note = 2'-O-methyl nucleotide
  modified_base 57: mod_base = OTHER; note = 2'-O-methyl nucleotide
  modified_base 58: mod_base = OTHER; note = 2'-O-methyl nucleotide
  modified_base 59: mod_base = OTHER; note = 2'-O-methyl nucleotide
  modified_base 60: mod_base = OTHER; note = 2'-O-methyl nucleotide
  modified_base 61: mod_base = OTHER; note = 2'-O-methyl nucleotide
  modified_base 62: mod_base = OTHER; note = 2'-O-methyl nucleotide
  modified_base 63: mod_base = OTHER; note = 2'-O-methyl nucleotide
  modified_base 64: mod_base = OTHER; note = 2'-O-methyl nucleotide
  modified_base 65: mod_base = OTHER; note = 2'-O-methyl nucleotide
  modified_base 66: mod_base = OTHER; note = 2'-O-methyl nucleotide
  modified_base 67: mod_base = OTHER; note = 2'-O-methyl nucleotide
  modified_base 68: mod_base = OTHER; note = 2'-O-methyl nucleotide
  modified_base 69: mod_base = OTHER; note = 2'-O-methyl nucleotide
  modified_base 70: mod_base = OTHER; note = 2'-O-methyl nucleotide
  modified_base 71: mod_base = OTHER; note = 2'-O-methyl nucleotide
  modified_base 72: mod_base = OTHER; note = 2'-O-methyl nucleotide
  modified_base 73: mod_base = OTHER; note = 2'-O-methyl nucleotide
  modified_base 74: mod_base = OTHER; note = 2'-O-methyl nucleotide
  modified_base 75: mod_base = OTHER; note = 2'-O-methyl nucleotide
  modified_base 76: mod_base = OTHER; note = 2'-O-methyl nucleotide
  modified_base 77: mod_base = OTHER; note = 2'-O-methyl nucleotide
  modified_base 78: mod_base = OTHER; note = 2'-O-methyl nucleotide, phosphorothioate linkage
  modified_base 79: mod_base = OTHER; note = 2'-O-methyl nucleotide, phosphorothioate linkage
  modified_base 80: mod_base = OTHER; note = 2'-O-methyl nucleotide
  source 1..80: mol_type = other RNA

SEQ ID NO: 425 - RNA, 80 nt, synthetic construct; identical to SEQ ID NO: 201
  misc_feature 1..80: note = Synthetic
  modified_base 9: mod_base = OTHER; note = 2'-O-methyl nucleotide
  modified_base 10: mod_base = OTHER; note = 2'-O-methyl nucleotide
  modified_base 11: mod_base = OTHER; note = 2'-O-methyl nucleotide
  modified_base 12: mod_base = OTHER; note = 2'-O-methyl nucleotide
  modified_base 13: mod_base = OTHER; note = 2'-O-methyl nucleotide
  modified_base 14: mod_base = OTHER; note = 2'-O-methyl nucleotide
  modified_base 15: mod_base = OTHER; note = 2'-O-methyl nucleotide
  modified_base 16: mod_base = OTHER; note = 2'-O-methyl nucleotide
  modified_base 17: mod_base = OTHER; note = 2'-O-methyl nucleotide
  modified_base 18: mod_base = OTHER; note = 2'-O-methyl nucleotide
  modified_base 19: mod_base = OTHER; note = 2'-O-methyl nucleotide
  modified_base 20: mod_base = OTHER; note = 2'-O-methyl nucleotide
  modified_base 49: mod_base = OTHER; note = 2'-O-methyl nucleotide
  modified_base 50: mod_base = OTHER; note = 2'-O-methyl nucleotide
  modified_base 51: mod_base = OTHER; note = 2'-O-methyl nucleotide
  modified_base 52: mod_base = OTHER; note = 2'-O-methyl nucleotide
  modified_base 53: mod_base = OTHER; note = 2'-O-methyl nucleotide
  modified_base 54: mod_base = OTHER; note = 2'-O-methyl nucleotide
  modified_base 55: mod_base = OTHER; note = 2'-O-methyl nucleotide
  modified_base 56: mod_base = OTHER; note = 2'-O-methyl nucleotide
  modified_base 57: mod_base = OTHER; note = 2'-O-methyl nucleotide
  modified_base 58: mod_base = OTHER; note = 2'-O-methyl nucleotide
  modified_base 59: mod_base = OTHER; note = 2'-O-methyl nucleotide
  modified_base 60: mod_base = OTHER; note = 2'-O-methyl nucleotide
  modified_base 61: mod_base = OTHER; note = 2'-O-methyl nucleotide
  modified_base 62: mod_base = OTHER; note = 2'-O-methyl nucleotide
  modified_base 63: mod_base = OTHER; note = 2'-O-methyl nucleotide
  modified_base 64: mod_base = OTHER; note = 2'-O-methyl nucleotide
  modified_base 65: mod_base = OTHER; note = 2'-O-methyl nucleotide
  modified_base 66: mod_base = OTHER; note = 2'-O-methyl nucleotide
  modified_base 67: mod_base = OTHER; note = 2'-O-methyl nucleotide
  modified_base 68: mod_base = OTHER; note = 2'-O-methyl nucleotide
  modified_base 69: mod_base = OTHER; note = 2'-O-methyl nucleotide
  modified_base 70: mod_base = OTHER; note = 2'-fluoro modification
  modified_base 71: mod_base = OTHER; note = 2'-fluoro modification
  modified_base 72: mod_base = OTHER; note = 2'-fluoro modification
  modified_base 73: mod_base = OTHER; note = 2'-fluoro modification
  modified_base 74: mod_base = OTHER; note = 2'-fluoro modification
  modified_base 75: mod_base = OTHER; note = 2'-fluoro modification
  modified_base 76: mod_base = OTHER; note = 2'-fluoro modification
  modified_base 77: mod_base = OTHER; note = 2'-fluoro modification, phosphorothioate linkage
  modified_base 78: mod_base = OTHER; note = 2'-fluoro modification, phosphorothioate linkage
  modified_base 79: mod_base = OTHER; note = 2'-fluoro modification, phosphorothioate linkage
  modified_base 80: mod_base = OTHER; note = 2'-O-methyl nucleotide
  source 1..80: mol_type = other RNA

SEQ ID NO: 426 - RNA, 80 nt, synthetic construct; identical to SEQ ID NO: 201
  misc_feature 1..80: note = Synthetic
  modified_base 9: mod_base = OTHER; note = 2'-O-methyl nucleotide
  modified_base 10: mod_base = OTHER; note = 2'-O-methyl nucleotide
  modified_base 11: mod_base = OTHER; note = 2'-O-methyl nucleotide
  modified_base 12: mod_base = OTHER; note = 2'-O-methyl nucleotide
  modified_base 13: mod_base = OTHER; note = 2'-O-methyl nucleotide
  modified_base 14: mod_base = OTHER; note = 2'-O-methyl nucleotide
  modified_base 15: mod_base = OTHER; note = 2'-O-methyl nucleotide
  modified_base 16: mod_base = OTHER; note = 2'-O-methyl nucleotide
  modified_base 17: mod_base = OTHER; note = 2'-O-methyl nucleotide
  modified_base 18: mod_base = OTHER; note = 2'-O-methyl nucleotide
  modified_base 19: mod_base = OTHER; note = 2'-O-methyl nucleotide
  modified_base 20: mod_base = OTHER; note = 2'-O-methyl nucleotide
  modified_base 49: mod_base = OTHER; note = 2'-fluoro modification
  modified_base 50: mod_base = OTHER; note = 2'-O-methyl nucleotide
  modified_base 51: mod_base = OTHER; note = 2'-fluoro modification
  modified_base 52: mod_base = OTHER; note = 2'-O-methyl nucleotide
  modified_base 53: mod_base = OTHER; note = 2'-fluoro modification
  modified_base 54: mod_base = OTHER; note = 2'-O-methyl nucleotide
  modified_base 55: mod_base = OTHER; note = 2'-fluoro modification
  modified_base 56: mod_base = OTHER; note = 2'-O-methyl nucleotide
  modified_base 57: mod_base = OTHER; note = 2'-fluoro modification
  modified_base 58: mod_base = OTHER; note = 2'-O-methyl nucleotide
  modified_base 59: mod_base = OTHER; note = 2'-fluoro modification
  modified_base 60: mod_base = OTHER; note = 2'-O-methyl nucleotide
  modified_base 61: mod_base = OTHER; note = 2'-fluoro modification
  modified_base 62: mod_base = OTHER; note = 2'-O-methyl nucleotide
  modified_base 63: mod_base = OTHER; note = 2'-fluoro modification
  modified_base 64: mod_base = OTHER; note = 2'-O-methyl nucleotide
  modified_base 65: mod_base = OTHER; note = 2'-fluoro modification
  modified_base 66: mod_base = OTHER; note = 2'-O-methyl nucleotide
  modified_base 67: mod_base = OTHER; note = 2'-fluoro modification
  modified_base 68: mod_base = OTHER; note = 2'-O-methyl nucleotide
  modified_base 69: mod_base = OTHER; note = 2'-fluoro modification
  modified_base 70: mod_base = OTHER; note = 2'-O-methyl nucleotide
  modified_base 71: mod_base = OTHER; note = 2'-fluoro modification
  modified_base 72: mod_base = OTHER; note = 2'-O-methyl nucleotide
  modified_base 73: mod_base = OTHER; note = 2'-fluoro modification
  modified_base 74: mod_base = OTHER; note = 2'-O-methyl nucleotide
  modified_base 75: mod_base = OTHER; note = 2'-fluoro modification
  modified_base 76: mod_base = OTHER; note = 2'-O-methyl nucleotide
  modified_base 77: mod_base = OTHER; note = 2'-fluoro modification, phosphorothioate linkage
  modified_base 78: mod_base = OTHER; note = 2'-O-methyl nucleotide, phosphorothioate linkage
  modified_base 79: mod_base = OTHER; note = 2'-fluoro modification, phosphorothioate linkage
  modified_base 80: mod_base = OTHER; note = 2'-O-methyl nucleotide
  source 1..80: mol_type = other RNA

SEQ ID NO: 427 - RNA, 80 nt, synthetic construct; identical to SEQ ID NO: 201
  misc_feature 1..80: note = Synthetic
  modified_base 1: mod_base = OTHER; note = 2'-O-methyl nucleotide
  modified_base 6: mod_base = OTHER; note = 2'-O-methyl nucleotide
  modified_base 9: mod_base = OTHER; note = 2'-O-methyl nucleotide
  modified_base 10: mod_base = OTHER; note = 2'-O-methyl nucleotide
  modified_base 11: mod_base = OTHER; note = 2'-O-methyl nucleotide
  modified_base 12: mod_base = OTHER; note = 2'-O-methyl nucleotide
  modified_base 13: mod_base = OTHER; note = 2'-O-methyl nucleotide
  modified_base 14: mod_base = OTHER; note = 2'-O-methyl nucleotide
  modified_base 15: mod_base = OTHER; note = 2'-O-methyl nucleotide
  modified_base 16: mod_base = OTHER; note = 2'-O-methyl nucleotide
  modified_base 17: mod_base = OTHER; note = 2'-O-methyl nucleotide
  modified_base 18: mod_base = OTHER; note = 2'-O-methyl nucleotide
  modified_base 19: mod_base = OTHER; note = 2'-O-methyl nucleotide
  modified_base 20: mod_base = OTHER; note = 2'-O-methyl nucleotide
  modified_base 49: mod_base = OTHER; note = 2'-O-methyl nucleotide
  modified_base 50: mod_base = OTHER; note = 2'-O-methyl nucleotide
  modified_base 51: mod_base = OTHER; note = 2'-O-methyl nucleotide
  modified_base 52: mod_base = OTHER; note = 2'-O-methyl nucleotide
  modified_base 53: mod_base = OTHER; note = 2'-O-methyl nucleotide
  modified_base 54: mod_base = OTHER; note = 2'-O-methyl nucleotide
  modified_base 55: mod_base = OTHER; note = 2'-O-methyl nucleotide
  modified_base 56: mod_base = OTHER; note = 2'-O-methyl nucleotide
  modified_base 57: mod_base = OTHER; note = 2'-O-methyl nucleotide
  modified_base 58: mod_base = OTHER; note = 2'-O-methyl nucleotide
  modified_base 59: mod_base = OTHER; note = 2'-O-methyl nucleotide
  modified_base 60: mod_base = OTHER; note = 2'-O-methyl nucleotide
  modified_base 61: mod_base = OTHER; note = 2'-O-methyl nucleotide
  modified_base 62: mod_base = OTHER; note = 2'-O-methyl nucleotide
  modified_base 63: mod_base = OTHER; note = 2'-O-methyl nucleotide
  modified_base 64: mod_base = OTHER; note = 2'-O-methyl nucleotide
  modified_base 65: mod_base = OTHER; note = 2'-O-methyl nucleotide
  modified_base 66: mod_base = OTHER; note = 2'-O-methyl nucleotide
  modified_base 67: mod_base = OTHER; note = 2'-O-methyl nucleotide
  modified_base 68: mod_base = OTHER; note = 2'-O-methyl nucleotide
  modified_base 69: mod_base = OTHER; note = 2'-O-methyl nucleotide
  modified_base 70: mod_base = OTHER; note = 2'-O-methyl nucleotide
  modified_base 71: mod_base = OTHER; note = 2'-O-methyl nucleotide
  modified_base 72: mod_base = OTHER; note = 2'-O-methyl nucleotide
  modified_base 73: mod_base = OTHER; note = 2'-O-methyl nucleotide
  modified_base 74: mod_base = OTHER; note = 2'-O-methyl nucleotide
  modified_base 75: mod_base = OTHER; note = 2'-O-methyl nucleotide
  modified_base 76: mod_base = OTHER; note = 2'-O-methyl nucleotide
  modified_base 77: mod_base = OTHER; note = 2'-O-methyl nucleotide, phosphorothioate linkage
  modified_base 78: mod_base = OTHER; note = 2'-O-methyl nucleotide, phosphorothioate linkage
  modified_base 79: mod_base = OTHER; note = 2'-O-methyl nucleotide, phosphorothioate linkage
  modified_base 80: mod_base = OTHER; note = 2'-O-methyl nucleotide
  source 1..80: mol_type = other RNA

SEQ ID NO: 428 - RNA, 80 nt, synthetic construct; identical to SEQ ID NO: 201
  misc_feature 1..80: note = Synthetic
  modified_base 1: mod_base = OTHER; note = 2'-fluoro modification
  modified_base 2: mod_base = OTHER; note = 2'-fluoro modification
  modified_base 3: mod_base = OTHER; note = 2'-fluoro modification
  modified_base 4: mod_base = OTHER; note = 2'-fluoro modification
  modified_base 5: mod_base = OTHER; note = 2'-fluoro modification
  modified_base 6: mod_base = OTHER; note = 2'-fluoro modification
  modified_base 9: mod_base = OTHER; note = 2'-O-methyl nucleotide
  modified_base 10: mod_base = OTHER; note = 2'-O-methyl nucleotide
  modified_base 11: mod_base = OTHER; note = 2'-O-methyl nucleotide
  modified_base 12: mod_base = OTHER; note = 2'-O-methyl nucleotide
  modified_base 13: mod_base = OTHER; note = 2'-O-methyl nucleotide
  modified_base 14: mod_base = OTHER; note = 2'-O-methyl nucleotide
  modified_base 15: mod_base = OTHER; note = 2'-O-methyl nucleotide
  modified_base 16: mod_base = OTHER; note = 2'-O-methyl nucleotide
  modified_base 17: mod_base = OTHER; note = 2'-O-methyl nucleotide
  modified_base 18: mod_base = OTHER; note = 2'-O-methyl nucleotide
  modified_base 19: mod_base = OTHER; note = 2'-O-methyl nucleotide
  modified_base 20: mod_base = OTHER; note = 2'-O-methyl nucleotide
  modified_base 49: mod_base = OTHER; note = 2'-O-methyl nucleotide
  modified_base 50: mod_base = OTHER; note = 2'-O-methyl nucleotide
  modified_base 51: mod_base = OTHER; note = 2'-O-methyl nucleotide
  modified_base 52: mod_base = OTHER; note = 2'-O-methyl nucleotide
  modified_base 53: mod_base = OTHER; note = 2'-O-methyl nucleotide
  modified_base 54: mod_base = OTHER; note = 2'-O-methyl nucleotide
  modified_base 55: mod_base = OTHER; note = 2'-O-methyl nucleotide
  modified_base 56: mod_base = OTHER; note = 2'-O-methyl nucleotide
  modified_base 57: mod_base = OTHER; note = 2'-O-methyl nucleotide
  modified_base 58: mod_base = OTHER; note = 2'-O-methyl nucleotide
  modified_base 59: mod_base = OTHER; note = 2'-O-methyl nucleotide
  modified_base 60: mod_base = OTHER; note = 2'-O-methyl nucleotide
  modified_base 61: mod_base = OTHER; note = 2'-O-methyl nucleotide
  modified_base 62: mod_base = OTHER; note = 2'-O-methyl nucleotide
  modified_base 63: mod_base = OTHER; note = 2'-O-methyl nucleotide
  modified_base 64: mod_base = OTHER; note = 2'-O-methyl nucleotide
  modified_base 65: mod_base = OTHER; note = 2'-O-methyl nucleotide
  modified_base 66: mod_base = OTHER; note = 2'-O-methyl nucleotide
  modified_base 67: mod_base = OTHER; note = 2'-O-methyl nucleotide
  modified_base 68: mod_base = OTHER; note = 2'-O-methyl nucleotide
  modified_base 69: mod_base = OTHER; note = 2'-O-methyl nucleotide
  modified_base 70: mod_base = OTHER; note = 2'-O-methyl nucleotide
  modified_base 71: mod_base = OTHER; note = 2'-O-methyl nucleotide
  modified_base 72: mod_base = OTHER; note = 2'-O-methyl nucleotide
  modified_base 73: mod_base = OTHER; note = 2'-O-methyl nucleotide
  modified_base 74: mod_base = OTHER; note = 2'-O-methyl nucleotide
  modified_base 75: mod_base = OTHER; note = 2'-O-methyl nucleotide
  modified_base 76: mod_base = OTHER; note = 2'-O-methyl nucleotide
  modified_base 77: mod_base = OTHER; note = 2'-O-methyl nucleotide, phosphorothioate linkage
  modified_base 78: mod_base = OTHER; note = 2'-O-methyl nucleotide, phosphorothioate linkage
  modified_base 79: mod_base = OTHER; note = 2'-O-methyl nucleotide, phosphorothioate linkage
  modified_base 80: mod_base = OTHER; note = 2'-O-methyl nucleotide
  source 1..80: mol_type = other RNA

SEQ ID NO: 429 - RNA, 80 nt, synthetic construct; identical to SEQ ID NO: 201
  misc_feature 1..80: note = Synthetic
  modified_base 1: mod_base = OTHER; note = 2'-O-methyl nucleotide
  modified_base 2: mod_base = OTHER; note = 2'-fluoro modification
  modified_base 3: mod_base = OTHER; note = 2'-fluoro modification
  modified_base 4: mod_base = OTHER; note = 2'-fluoro modification
  modified_base 5: mod_base = OTHER; note = 2'-fluoro modification
  modified_base 6: mod_base = OTHER; note = 2'-O-methyl nucleotide
  modified_base 9: mod_base = OTHER; note = 2'-O-methyl nucleotide
  modified_base 10: mod_base = OTHER; note = 2'-O-methyl nucleotide
  modified_base 11: mod_base = OTHER; note = 2'-O-methyl nucleotide
  modified_base 12: mod_base = OTHER; note = 2'-O-methyl nucleotide
  modified_base 13: mod_base = OTHER; note = 2'-O-methyl nucleotide
  modified_base 14: mod_base = OTHER; note = 2'-O-methyl nucleotide
  modified_base 15: mod_base = OTHER; note = 2'-O-methyl nucleotide
  modified_base 16: mod_base = OTHER; note = 2'-O-methyl nucleotide
  modified_base 17: mod_base = OTHER; note = 2'-O-methyl nucleotide
  modified_base 18: mod_base = OTHER; note = 2'-O-methyl nucleotide
  modified_base 19: mod_base = OTHER; note = 2'-O-methyl nucleotide
  modified_base 20: mod_base = OTHER; note = 2'-O-methyl nucleotide
  modified_base 49: mod_base = OTHER; note = 2'-O-methyl nucleotide
  modified_base 50: mod_base = OTHER; note = 2'-O-methyl nucleotide
  modified_base 51: mod_base = OTHER; note = 2'-O-methyl nucleotide
  modified_base 52: mod_base = OTHER; note = 2'-O-methyl nucleotide
  modified_base 53: mod_base = OTHER; note = 2'-O-methyl nucleotide
  modified_base 54: mod_base = OTHER; note = 2'-O-methyl nucleotide
  modified_base 55: mod_base = OTHER; note = 2'-O-methyl nucleotide
  modified_base 56: mod_base = OTHER; note = 2'-O-methyl nucleotide
  modified_base 57: mod_base = OTHER; note = 2'-O-methyl nucleotide
  modified_base 58: mod_base = OTHER; note = 2'-O-methyl nucleotide
  modified_base 59: mod_base = OTHER; note = 2'-O-methyl nucleotide
  modified_base 60: mod_base = OTHER; note = 2'-O-methyl nucleotide
  modified_base 61: mod_base = OTHER; note = 2'-O-methyl nucleotide
  modified_base 62: mod_base = OTHER; note = 2'-O-methyl nucleotide
  modified_base 63: mod_base = OTHER; note = 2'-O-methyl nucleotide
  modified_base 64: mod_base = OTHER; note = 2'-O-methyl nucleotide
  modified_base 65: mod_base = OTHER; note = 2'-O-methyl nucleotide
  modified_base 66: mod_base = OTHER; note = 2'-O-methyl nucleotide
  modified_base 67: mod_base = OTHER; note = 2'-O-methyl nucleotide
  modified_base 68: mod_base = OTHER; note = 2'-O-methyl nucleotide
  modified_base 69: mod_base = OTHER; note = 2'-O-methyl nucleotide
  modified_base 70: mod_base = OTHER; note = 2'-O-methyl nucleotide
  modified_base 71: mod_base = OTHER; note = 2'-O-methyl nucleotide
  modified_base 72: mod_base = OTHER; note = 2'-O-methyl nucleotide
  modified_base 73: mod_base = OTHER; note = 2'-O-methyl nucleotide
  modified_base 74: mod_base = OTHER; note = 2'-O-methyl nucleotide
  modified_base 75: mod_base = OTHER; note = 2'-O-methyl nucleotide
  modified_base 76: mod_base = OTHER; note = 2'-O-methyl nucleotide
  modified_base 77: mod_base = OTHER; note = 2'-O-methyl nucleotide, phosphorothioate linkage
  modified_base 78: mod_base = OTHER; note = 2'-O-methyl nucleotide, phosphorothioate linkage
  modified_base 79: mod_base = OTHER; note = 2'-O-methyl nucleotide, phosphorothioate linkage
  modified_base 80: mod_base = OTHER; note = 2'-O-methyl nucleotide
  source 1..80: mol_type = other RNA

SEQ ID NO: 430 - RNA, 80 nt, synthetic construct; identical to SEQ ID NO: 201
  misc_feature 1..80: note = Synthetic
  modified_base 9: mod_base = OTHER; note = 2'-O-methyl nucleotide
  modified_base 10: mod_base = OTHER; note = 2'-O-methyl nucleotide
  modified_base 11: mod_base = OTHER; note = 2'-O-methyl nucleotide
  modified_base 12: mod_base = OTHER; note = 2'-O-methyl nucleotide
  modified_base 13: mod_base = OTHER; note = 2'-O-methyl nucleotide
  modified_base 14: mod_base = OTHER; note = 2'-O-methyl nucleotide
  modified_base 15: mod_base = OTHER; note = 2'-O-methyl nucleotide
  modified_base 16: mod_base = OTHER; note = 2'-O-methyl nucleotide
  modified_base 17: mod_base = OTHER; note = 2'-O-methyl nucleotide
  modified_base 18: mod_base = OTHER; note = 2'-O-methyl nucleotide
  modified_base 19: mod_base = OTHER; note = 2'-O-methyl nucleotide
  modified_base 20: mod_base = OTHER; note = 2'-O-methyl nucleotide
  modified_base 25: mod_base = OTHER; note = 2'-O-methyl nucleotide
  modified_base 26: mod_base = OTHER; note = 2'-O-methyl nucleotide
  modified_base 29: mod_base = OTHER; note = 2'-O-methyl nucleotide
  modified_base 30: mod_base = OTHER; note = 2'-O-methyl nucleotide
  modified_base 49: mod_base = OTHER; note = 2'-O-methyl nucleotide
  modified_base 50: mod_base = OTHER; note = 2'-O-methyl nucleotide
  modified_base 51: mod_base = OTHER; note = 2'-O-methyl nucleotide
  modified_base 52: mod_base = OTHER; note = 2'-O-methyl nucleotide
  modified_base 53: mod_base = OTHER; note = 2'-O-methyl nucleotide
  modified_base 54: mod_base = OTHER; note = 2'-O-methyl nucleotide
  modified_base 55: mod_base = OTHER; note = 2'-O-methyl nucleotide
  modified_base 56: mod_base = OTHER; note = 2'-O-methyl nucleotide
  modified_base 57: mod_base = OTHER; note = 2'-O-methyl nucleotide
  modified_base 58: mod_base = OTHER; note = 2'-O-methyl nucleotide
  modified_base 59: mod_base = OTHER; note = 2'-O-methyl nucleotide
  modified_base 60: mod_base = OTHER; note = 2'-O-methyl nucleotide
  modified_base 61: mod_base = OTHER; note = 2'-O-methyl nucleotide
  modified_base 62: mod_base = OTHER; note = 2'-O-methyl nucleotide
  modified_base 63: mod_base = OTHER; note = 2'-O-methyl nucleotide
  modified_base 64: mod_base = OTHER; note = 2'-O-methyl nucleotide
  modified_base 65: mod_base = OTHER; note = 2'-O-methyl nucleotide
  modified_base 66: mod_base = OTHER; note = 2'-O-methyl nucleotide
  modified_base 67: mod_base = OTHER; note = 2'-O-methyl nucleotide
  modified_base 68: mod_base = OTHER; note = 2'-O-methyl nucleotide
  modified_base 69: mod_base = OTHER; note = 2'-O-methyl nucleotide
  modified_base 70: mod_base = OTHER; note = 2'-O-methyl nucleotide
  modified_base 71: mod_base = OTHER; note = 2'-O-methyl nucleotide
  modified_base 72: mod_base = OTHER; note = 2'-O-methyl nucleotide
  modified_base 73: mod_base = OTHER; note = 2'-O-methyl nucleotide
  modified_base 74: mod_base = OTHER; note = 2'-O-methyl nucleotide
  modified_base 75: mod_base = OTHER; note = 2'-O-methyl nucleotide
  modified_base 76: mod_base = OTHER; note = 2'-O-methyl nucleotide
  modified_base 77: mod_base = OTHER; note = 2'-O-methyl nucleotide, phosphorothioate linkage
  modified_base 78: mod_base = OTHER; note = 2'-O-methyl nucleotide, phosphorothioate linkage
  modified_base 79: mod_base = OTHER; note = 2'-O-methyl nucleotide, phosphorothioate linkage
  modified_base 80: mod_base = OTHER; note = 2'-O-methyl nucleotide
  source 1..80: mol_type = other RNA

SEQ ID NO: 431 - RNA, 80 nt, synthetic construct; identical to SEQ ID NO: 201
  misc_feature 1..80: note = Synthetic
  modified_base 9: mod_base = OTHER; note = 2'-O-methyl nucleotide
  modified_base 10: mod_base = OTHER; note = 2'-O-methyl nucleotide
  modified_base 11: mod_base = OTHER; note = 2'-O-methyl nucleotide
  modified_base 12: mod_base = OTHER; note = 2'-O-methyl nucleotide
  modified_base 13: mod_base = OTHER; note = 2'-O-methyl nucleotide
  modified_base 14: mod_base = OTHER; note = 2'-O-methyl nucleotide
  modified_base 15: mod_base = OTHER; note = 2'-O-methyl nucleotide
  modified_base 16: mod_base = OTHER; note = 2'-O-methyl nucleotide
  modified_base 17: mod_base = OTHER; note = 2'-O-methyl nucleotide
  modified_base 18: mod_base = OTHER; note = 2'-O-methyl nucleotide
  modified_base 19: mod_base = OTHER; note = 2'-O-methyl nucleotide
  modified_base 20: mod_base = OTHER; note = 2'-O-methyl nucleotide
  modified_base 25: mod_base = OTHER; note = 2'-O-methyl nucleotide
  modified_base 26: mod_base = OTHER; note = 2'-O-methyl nucleotide
  modified_base 27: mod_base = OTHER; note = 2'-fluoro modification
  modified_base 28: mod_base = OTHER; note = 2'-fluoro modification
  modified_base 29: mod_base = OTHER; note = 2'-O-methyl nucleotide
  modified_base 30: mod_base = OTHER; note = 2'-O-methyl nucleotide
  modified_base 49: mod_base = OTHER; note = 2'-O-methyl nucleotide
  modified_base 50: mod_base = OTHER; note = 2'-O-methyl nucleotide
  modified_base 51: mod_base = OTHER; note = 2'-O-methyl nucleotide
  modified_base 52: mod_base = OTHER; note = 2'-O-methyl nucleotide
  modified_base 53: mod_base = OTHER; note = 2'-O-methyl nucleotide
  modified_base 54: mod_base = OTHER; note = 2'-O-methyl nucleotide
  modified_base 55: mod_base = OTHER; note = 2'-O-methyl nucleotide
  modified_base 56: mod_base = OTHER; note = 2'-O-methyl nucleotide
  modified_base 57: mod_base = OTHER; note = 2'-O-methyl nucleotide
  modified_base 58: mod_base = OTHER; note = 2'-O-methyl nucleotide
  modified_base 59: mod_base = OTHER; note = 2'-O-methyl nucleotide
  modified_base 60: mod_base = OTHER; note = 2'-O-methyl nucleotide
  modified_base 61: mod_base = OTHER; note = 2'-O-methyl nucleotide
  modified_base 62: mod_base = OTHER; note = 2'-O-methyl nucleotide
  modified_base 63: mod_base = OTHER; note = 2'-O-methyl nucleotide
  modified_base 64: mod_base = OTHER; note = 2'-O-methyl nucleotide
  modified_base 65: mod_base = OTHER; note = 2'-O-methyl nucleotide
  modified_base 66: mod_base = OTHER; note = 2'-O-methyl nucleotide
  modified_base 67: mod_base = OTHER; note = 2'-O-methyl nucleotide
  modified_base 68: mod_base = OTHER; note = 2'-O-methyl nucleotide
  modified_base 69: mod_base = OTHER; note = 2'-O-methyl nucleotide
  modified_base 70: mod_base = OTHER; note = 2'-O-methyl nucleotide
  modified_base 71: mod_base = OTHER; note = 2'-O-methyl nucleotide
  modified_base 72: mod_base = OTHER; note = 2'-O-methyl nucleotide
  modified_base 73: mod_base = OTHER; note = 2'-O-methyl nucleotide
  modified_base 74: mod_base = OTHER; note = 2'-O-methyl nucleotide
  modified_base 75: mod_base = OTHER; note = 2'-O-methyl nucleotide
  modified_base 76: mod_base = OTHER; note = 2'-O-methyl nucleotide
  modified_base 77: mod_base = OTHER; note = 2'-O-methyl nucleotide, phosphorothioate linkage
  modified_base 78: mod_base = OTHER; note = 2'-O-methyl nucleotide, phosphorothioate linkage
  modified_base 79: mod_base = OTHER; note = 2'-O-methyl nucleotide, phosphorothioate linkage
  modified_base 80: mod_base = OTHER; note = 2'-O-methyl nucleotide
  source 1..80: mol_type = other RNA

SEQ ID NO: 432 - RNA, 80 nt, synthetic construct; identical to SEQ ID NO: 201
  misc_feature 1..80: note = Synthetic
  modified_base 9: mod_base = OTHER; note = 2'-O-methyl nucleotide
  modified_base 10: mod_base = OTHER; note = 2'-O-methyl nucleotide
  modified_base 11: mod_base = OTHER; note = 2'-O-methyl nucleotide
  modified_base 12: mod_base = OTHER; note = 2'-O-methyl nucleotide
  modified_base 13: mod_base = OTHER; note = 2'-O-methyl nucleotide
  modified_base 14: mod_base = OTHER; note = 2'-O-methyl nucleotide
  modified_base 15: mod_base = OTHER; note = 2'-O-methyl nucleotide
  modified_base 16: mod_base = OTHER; note = 2'-O-methyl nucleotide
  modified_base 17: mod_base = OTHER; note = 2'-O-methyl nucleotide
  modified_base 18: mod_base = OTHER; note = 2'-O-methyl nucleotide
  modified_base 19: mod_base = OTHER; note = 2'-O-methyl nucleotide
  modified_base 20: mod_base = OTHER; note = 2'-O-methyl nucleotide
  modified_base 25: mod_base = OTHER; note = 2'-fluoro modification
  modified_base 26: mod_base = OTHER; note = 2'-O-methyl nucleotide
  modified_base 27: mod_base = OTHER; note = 2'-fluoro modification
  modified_base 28: mod_base = OTHER; note = 2'-O-methyl nucleotide
  modified_base 29: mod_base = OTHER; note = 2'-fluoro modification
  modified_base 30: mod_base = OTHER; note = 2'-O-methyl nucleotide
  modified_base 49: mod_base = OTHER; note = 2'-O-methyl nucleotide
  modified_base 50: mod_base = OTHER; note = 2'-O-methyl nucleotide
  modified_base 51: mod_base = OTHER; note = 2'-O-methyl nucleotide
  modified_base 52: mod_base = OTHER; note = 2'-O-methyl nucleotide
  modified_base 53: mod_base = OTHER; note = 2'-O-methyl nucleotide
  modified_base 54: mod_base = OTHER; note = 2'-O-methyl nucleotide
  modified_base 55: mod_base = OTHER; note = 2'-O-methyl nucleotide
  modified_base 56: mod_base = OTHER; note = 2'-O-methyl nucleotide
  modified_base 57: mod_base = OTHER; note = 2'-O-methyl nucleotide
  modified_base 58: mod_base = OTHER; note = 2'-O-methyl nucleotide
  modified_base 59: mod_base = OTHER; note = 2'-O-methyl nucleotide
  modified_base 60: mod_base = OTHER; note = 2'-O-methyl nucleotide
  modified_base 61: mod_base = OTHER; note = 2'-O-methyl nucleotide
  modified_base 62: mod_base = OTHER; note = 2'-O-methyl nucleotide
  modified_base 63: mod_base = OTHER; note = 2'-O-methyl nucleotide
  modified_base 64: mod_base = OTHER; note = 2'-O-methyl nucleotide
  modified_base 65: mod_base = OTHER; note = 2'-O-methyl nucleotide
  modified_base 66: mod_base = OTHER; note = 2'-O-methyl nucleotide
  modified_base 67: mod_base = OTHER; note = 2'-O-methyl nucleotide
  modified_base 68: mod_base = OTHER; note = 2'-O-methyl nucleotide
  modified_base 69: mod_base = OTHER; note = 2'-O-methyl nucleotide
  modified_base 70: mod_base = OTHER; note = 2'-O-methyl nucleotide
  modified_base 71: mod_base = OTHER; note = 2'-O-methyl nucleotide
  modified_base 72: mod_base = OTHER; note = 2'-O-methyl nucleotide
  modified_base 73: mod_base = OTHER; note = 2'-O-methyl nucleotide
  modified_base 74: mod_base = OTHER; note = 2'-O-methyl nucleotide
  modified_base 75: mod_base = OTHER; note = 2'-O-methyl nucleotide
  modified_base 76: mod_base = OTHER; note = 2'-O-methyl nucleotide
  modified_base 77: mod_base = OTHER; note = 2'-O-methyl nucleotide, phosphorothioate linkage
  modified_base 78: mod_base = OTHER; note = 2'-O-methyl nucleotide, phosphorothioate linkage
  modified_base 79: mod_base = OTHER; note = 2'-O-methyl nucleotide, phosphorothioate linkage
  modified_base 80: mod_base = OTHER; note = 2'-O-methyl nucleotide
  source 1..80: mol_type = other RNA

SEQ ID NO: 433 - RNA, 80 nt, synthetic construct; identical to SEQ ID NO: 201
  misc_feature 1..80: note = Synthetic
  modified_base 1: mod_base = OTHER; note = 2'-O-methyl nucleotide
  modified_base 6: mod_base = OTHER; note = 2'-O-methyl nucleotide
  modified_base 9: mod_base = OTHER; note = 2'-O-methyl nucleotide
  modified_base 10: mod_base = OTHER; note = 2'-O-methyl nucleotide
  modified_base 11: mod_base = OTHER; note = 2'-O-methyl nucleotide
  modified_base 12: mod_base = OTHER; note = 2'-O-methyl nucleotide
  modified_base 13: mod_base = OTHER; note = 2'-O-methyl nucleotide
  modified_base 14: mod_base = OTHER; note = 2'-O-methyl nucleotide
  modified_base 15: mod_base = OTHER; note = 2'-O-methyl nucleotide
  modified_base 16: mod_base = OTHER; note = 2'-O-methyl nucleotide
  modified_base 17: mod_base = OTHER; note = 2'-O-methyl nucleotide
  modified_base 18: mod_base = OTHER; note = 2'-O-methyl nucleotide
  modified_base 19: mod_base = OTHER; note = 2'-O-methyl nucleotide
  modified_base 20: mod_base = OTHER; note = 2'-O-methyl nucleotide
  modified_base 25: mod_base = OTHER; note = 2'-O-methyl nucleotide
  modified_base 26: mod_base = OTHER; note = 2'-O-methyl nucleotide
  modified_base 29: mod_base = OTHER; note = 2'-O-methyl nucleotide
  modified_base 30: mod_base = OTHER; note = 2'-O-methyl nucleotide
  modified_base 49: mod_base = OTHER; note = 2'-O-methyl nucleotide
  modified_base 50: mod_base = OTHER; note = 2'-O-methyl nucleotide
  modified_base 51: mod_base = OTHER; note = 2'-O-methyl nucleotide
  modified_base 52: mod_base = OTHER; note = 2'-O-methyl nucleotide
  modified_base 53: mod_base = OTHER; note = 2'-O-methyl nucleotide
  modified_base 54: mod_base = OTHER; note = 2'-O-methyl nucleotide
  modified_base 55: mod_base = OTHER; note = 2'-O-methyl nucleotide
  modified_base 56: mod_base = OTHER; note = 2'-O-methyl nucleotide
  modified_base 57: mod_base = OTHER; note = 2'-O-methyl nucleotide
  modified_base 58: mod_base = OTHER; note = 2'-O-methyl nucleotide
  modified_base 59: mod_base = OTHER; note = 2'-O-methyl nucleotide
  modified_base 60: mod_base = OTHER; note = 2'-O-methyl nucleotide
  modified_base 61: mod_base = OTHER; note = 2'-O-methyl nucleotide
  modified_base 62: mod_base = OTHER; note = 2'-O-methyl nucleotide
  modified_base 63: mod_base = OTHER; note = 2'-O-methyl nucleotide
  modified_base 64: mod_base = OTHER; note = 2'-O-methyl nucleotide
  modified_base 65: mod_base = OTHER; note = 2'-O-methyl nucleotide
  modified_base 66: mod_base = OTHER; note = 2'-O-methyl nucleotide
  modified_base 67: mod_base = OTHER; note = 2'-O-methyl nucleotide
  modified_base 68: mod_base = OTHER; note = 2'-O-methyl nucleotide
  modified_base 69: mod_base = OTHER; note = 2'-O-methyl nucleotide
  modified_base 70: mod_base = OTHER; note = 2'-O-methyl nucleotide
  modified_base 71: mod_base = OTHER; note = 2'-O-methyl nucleotide
  modified_base 72: mod_base = OTHER; note = 2'-O-methyl nucleotide
  modified_base 73: mod_base = OTHER; note = 2'-O-methyl nucleotide
  modified_base 74: mod_base = OTHER; note = 2'-O-methyl nucleotide
  modified_base 75: mod_base = OTHER; note = 2'-O-methyl nucleotide
  modified_base 76: mod_base = OTHER; note = 2'-O-methyl nucleotide
  modified_base 77: mod_base = OTHER; note = 2'-O-methyl nucleotide, phosphorothioate linkage
  modified_base 78: mod_base = OTHER; note = 2'-O-methyl nucleotide, phosphorothioate linkage
  modified_base 79: mod_base = OTHER; note = 2'-O-methyl nucleotide, phosphorothioate linkage
  modified_base 80: mod_base = OTHER; note = 2'-O-methyl nucleotide
  source 1..80: mol_type = other RNA

SEQ ID NO: 434 - RNA, 80 nt, synthetic construct; identical to SEQ ID NO: 201
  misc_feature 1..80: note = Synthetic
  modified_base 1: mod_base = OTHER; note = 2'-O-methyl nucleotide
  modified_base 6: mod_base = OTHER; note = 2'-O-methyl nucleotide
  modified_base 9: mod_base = OTHER; note = 2'-O-methyl nucleotide
  modified_base 10: mod_base = OTHER; note = 2'-O-methyl nucleotide
  modified_base 11: mod_base = OTHER; note = 2'-O-methyl nucleotide
  modified_base 12: mod_base = OTHER; note = 2'-O-methyl nucleotide
  modified_base 13: mod_base = OTHER; note = 2'-O-methyl nucleotide
  modified_base 14: mod_base = OTHER; note = 2'-O-methyl nucleotide
  modified_base 15: mod_base = OTHER; note = 2'-O-methyl nucleotide
  modified_base 16: mod_base = OTHER; note = 2'-O-methyl nucleotide
  modified_base 17: mod_base = OTHER; note = 2'-O-methyl nucleotide
  modified_base 18: mod_base = OTHER; note = 2'-O-methyl nucleotide
  modified_base 19: mod_base = OTHER; note = 2'-O-methyl nucleotide
  modified_base 20: mod_base = OTHER; note = 2'-O-methyl nucleotide
  modified_base 25: mod_base = OTHER; note = 2'-O-methyl nucleotide
  modified_base 26: mod_base = OTHER; note = 2'-O-methyl nucleotide
  modified_base 27: mod_base = OTHER; note = 2'-fluoro modification
  modified_base 28: mod_base = OTHER; note = 2'-fluoro modification
  modified_base 29: mod_base = OTHER; note = 2'-O-methyl nucleotide
  modified_base 30: mod_base = OTHER; note = 2'-O-methyl nucleotide
  modified_base 49: mod_base = OTHER; note = 2'-O-methyl nucleotide
  modified_base 50: mod_base = OTHER; note = 2'-O-methyl nucleotide
  modified_base 51: mod_base = OTHER; note = 2'-O-methyl nucleotide
  modified_base 52: mod_base = OTHER; note = 2'-O-methyl nucleotide
  modified_base 53: mod_base = OTHER; note = 2'-O-methyl nucleotide
  modified_base 54: mod_base = OTHER; note = 2'-O-methyl nucleotide
  modified_base 55: mod_base = OTHER; note = 2'-O-methyl nucleotide
  modified_base 56: mod_base = OTHER; note = 2'-O-methyl nucleotide
  modified_base 57: mod_base = OTHER; note = 2'-O-methyl nucleotide
  modified_base 58: mod_base = OTHER; note = 2'-O-methyl nucleotide
  modified_base 59: mod_base = OTHER; note = 2'-O-methyl nucleotide
  modified_base 60: mod_base = OTHER; note = 2'-O-methyl nucleotide
  modified_base 61: mod_base = OTHER; note = 2'-O-methyl nucleotide
  modified_base 62: mod_base = OTHER; note = 2'-O-methyl nucleotide
  modified_base 63: mod_base = OTHER; note = 2'-O-methyl nucleotide
  modified_base 64: mod_base = OTHER; note = 2'-O-methyl nucleotide
  modified_base 65: mod_base = OTHER; note = 2'-O-methyl nucleotide
  modified_base 66: mod_base = OTHER; note = 2'-O-methyl nucleotide
  modified_base 67: mod_base = OTHER; note = 2'-O-methyl nucleotide
  modified_base 68: mod_base = OTHER; note = 2'-O-methyl nucleotide
  modified_base 69: mod_base = OTHER; note = 2'-O-methyl nucleotide
  modified_base 70: mod_base = OTHER; note = 2'-O-methyl nucleotide
  modified_base 71: mod_base = OTHER; note = 2'-O-methyl nucleotide
  modified_base 72: mod_base = OTHER; note = 2'-O-methyl nucleotide
  modified_base 73: mod_base = OTHER; note = 2'-O-methyl nucleotide
  modified_base 74: mod_base = OTHER; note = 2'-O-methyl nucleotide
  modified_base 75: mod_base = OTHER; note = 2'-O-methyl nucleotide
  modified_base 76: mod_base = OTHER; note = 2'-O-methyl nucleotide
  modified_base 77: mod_base = OTHER; note = 2'-O-methyl nucleotide, phosphorothioate linkage
  modified_base 78: mod_base = OTHER; note = 2'-O-methyl nucleotide, phosphorothioate linkage
  modified_base 79: mod_base = OTHER; note = 2'-O-methyl nucleotide, phosphorothioate linkage
  modified_base 80: mod_base = OTHER; note = 2'-O-methyl nucleotide
  source 1..80: mol_type = other RNA

SEQ ID NO: 435 - RNA, 80 nt, synthetic construct; identical to SEQ ID NO: 201
  misc_feature 1..80: note = Synthetic
  modified_base 1: mod_base = OTHER; note = 2'-O-methyl nucleotide
  modified_base 6: mod_base = OTHER; note = 2'-O-methyl nucleotide
  modified_base 9: mod_base = OTHER; note = 2'-O-methyl nucleotide
  modified_base 10: mod_base = OTHER; note = 2'-O-methyl nucleotide
  modified_base 11: mod_base = OTHER; note = 2'-O-methyl nucleotide
  modified_base 12: mod_base = OTHER; note = 2'-O-methyl nucleotide
  modified_base 13: mod_base = OTHER; note = 2'-O-methyl nucleotide
  modified_base 14: mod_base = OTHER; note = 2'-O-methyl nucleotide
  modified_base 15: mod_base = OTHER; note = 2'-O-methyl nucleotide
  modified_base 16: mod_base = OTHER; note = 2'-O-methyl nucleotide
  modified_base 17: mod_base = OTHER; note = 2'-O-methyl nucleotide
  modified_base 18: mod_base = OTHER; note = 2'-O-methyl nucleotide
  modified_base 19: mod_base = OTHER; note = 2'-O-methyl nucleotide
  modified_base 20: mod_base = OTHER; note = 2'-O-methyl nucleotide
  modified_base 25: mod_base = OTHER; note = 2'-fluoro modification
  modified_base 26: mod_base = OTHER; note = 2'-O-methyl nucleotide
  modified_base 27: mod_base = OTHER; note = 2'-fluoro modification
  modified_base 28: mod_base = OTHER; note = 2'-O-methyl nucleotide
  modified_base 29: mod_base = OTHER; note = 2'-fluoro modification
  modified_base 30: mod_base = OTHER; note = 2'-O-methyl nucleotide
  modified_base 49: mod_base = OTHER; note = 2'-O-methyl nucleotide
  modified_base 50: mod_base = OTHER; note = 2'-O-methyl nucleotide
  modified_base 51: mod_base = OTHER; note = 2'-O-methyl nucleotide
  modified_base 52: mod_base = OTHER; note = 2'-O-methyl nucleotide
  modified_base 53: mod_base = OTHER; note = 2'-O-methyl nucleotide
  modified_base 54: mod_base = OTHER; note = 2'-O-methyl nucleotide
  modified_base 55: mod_base = OTHER; note = 2'-O-methyl nucleotide
  modified_base 56: mod_base = OTHER; note = 2'-O-methyl nucleotide
  modified_base 57: mod_base = OTHER; note = 2'-O-methyl nucleotide
  modified_base 58: mod_base = OTHER; note = 2'-O-methyl nucleotide
  modified_base 59: mod_base = OTHER; note = 2'-O-methyl nucleotide
  modified_base 60: mod_base = OTHER; note = 2'-O-methyl nucleotide
  modified_base 61: mod_base = OTHER; note = 2'-O-methyl nucleotide
  modified_base 62: mod_base = OTHER; note = 2'-O-methyl nucleotide
  modified_base 63: mod_base = OTHER; note = 2'-O-methyl nucleotide
  modified_base 64: mod_base = OTHER; note = 2'-O-methyl nucleotide
  modified_base 65: mod_base = OTHER; note = 2'-O-methyl nucleotide
  modified_base 66: mod_base = OTHER; note = 2'-O-methyl nucleotide
  modified_base 67: mod_base = OTHER; note = 2'-O-methyl nucleotide
  modified_base 68: mod_base = OTHER; note = 2'-O-methyl nucleotide
  modified_base 69: mod_base = OTHER; note = 2'-O-methyl nucleotide
  modified_base 70: mod_base = OTHER; note = 2'-O-methyl nucleotide
  modified_base 71: mod_base = OTHER; note = 2'-O-methyl nucleotide
  modified_base 72: mod_base = OTHER; note = 2'-O-methyl nucleotide
  modified_base 73: mod_base = OTHER; note = 2'-O-methyl nucleotide
  modified_base 74: mod_base = OTHER; note = 2'-O-methyl nucleotide
  modified_base 75: mod_base = OTHER; note = 2'-O-methyl nucleotide
  modified_base 76: mod_base = OTHER; note = 2'-O-methyl nucleotide
  modified_base 77: mod_base = OTHER; note = 2'-O-methyl nucleotide, phosphorothioate linkage
  modified_base 78: mod_base = OTHER; note = 2'-O-methyl nucleotide, phosphorothioate linkage
  modified_base 79: mod_base = OTHER; note = 2'-O-methyl nucleotide, phosphorothioate linkage
  modified_base 80: mod_base = OTHER; note = 2'-O-methyl nucleotide
  source 1..80: mol_type = other RNA

SEQ ID NO: 436 - RNA, 80 nt, synthetic construct; identical to SEQ ID NO: 201
  misc_feature 1..80: note = Synthetic
  modified_base 1: mod_base = OTHER; note = 2'-fluoro modification
  modified_base 2: mod_base = OTHER; note = 2'-fluoro modification
  modified_base 3: mod_base = OTHER; note = 2'-fluoro modification
  modified_base 4: mod_base = OTHER; note = 2'-fluoro modification
  modified_base 5: mod_base = OTHER; note = 2'-fluoro modification
  modified_base 6: mod_base = OTHER; note = 2'-fluoro modification
  modified_base 9: mod_base = OTHER; note = 2'-O-methyl nucleotide
  modified_base 10: mod_base = OTHER; note = 2'-O-methyl nucleotide
  modified_base 11: mod_base = OTHER; note = 2'-O-methyl nucleotide
  modified_base 12: mod_base = OTHER; note = 2'-O-methyl nucleotide
  modified_base 13: mod_base = OTHER; note = 2'-O-methyl nucleotide
  modified_base 14: mod_base = OTHER; note = 2'-O-methyl nucleotide
  modified_base 15: mod_base = OTHER; note = 2'-O-methyl nucleotide
  modified_base 16: mod_base = OTHER; note = 2'-O-methyl nucleotide
  modified_base 17: mod_base = OTHER; note = 2'-O-methyl nucleotide
  modified_base 18: mod_base = OTHER; note = 2'-O-methyl nucleotide
  modified_base 19: mod_base = OTHER; note = 2'-O-methyl nucleotide
  modified_base 20: mod_base = OTHER; note = 2'-O-methyl nucleotide
  modified_base 25: mod_base = OTHER; note = 2'-O-methyl nucleotide
  modified_base 26: mod_base = OTHER; note = 2'-O-methyl nucleotide
  modified_base 29: mod_base = OTHER; note = 2'-O-methyl nucleotide
  modified_base 30: mod_base = OTHER; note = 2'-O-methyl nucleotide
  modified_base 49: mod_base = OTHER; note = 2'-O-methyl nucleotide
  modified_base 50: mod_base = OTHER; note = 2'-O-methyl nucleotide
  modified_base 51: mod_base = OTHER; note = 2'-O-methyl nucleotide
  modified_base 52: mod_base = OTHER; note = 2'-O-methyl nucleotide
  modified_base 53: mod_base = OTHER; note = 2'-O-methyl nucleotide
  modified_base 54: mod_base = OTHER; note = 2'-O-methyl nucleotide
  modified_base 55: mod_base = OTHER; note = 2'-O-methyl nucleotide
  modified_base 56: mod_base = OTHER; note = 2'-O-methyl nucleotide
  modified_base 57: mod_base = OTHER; note = 2'-O-methyl nucleotide
  modified_base 58: mod_base = OTHER; note = 2'-O-methyl nucleotide
  modified_base 59: mod_base = OTHER; note = 2'-O-methyl nucleotide
  modified_base 60: mod_base = OTHER; note = 2'-O-methyl nucleotide
  modified_base 61: mod_base = OTHER; note = 2'-O-methyl nucleotide
  modified_base 62: mod_base = OTHER; note = 2'-O-methyl nucleotide
  modified_base 63: mod_base = OTHER; note = 2'-O-methyl nucleotide
  modified_base 64: mod_base = OTHER; note = 2'-O-methyl nucleotide
  modified_base 65: mod_base = OTHER; note = 2'-O-methyl nucleotide
  modified_base 66: mod_base = OTHER; note = 2'-O-methyl nucleotide
  modified_base 67: mod_base = OTHER; note = 2'-O-methyl nucleotide
  modified_base 68: mod_base = OTHER; note = 2'-O-methyl nucleotide
  modified_base 69: mod_base = OTHER; note = 2'-O-methyl nucleotide
  modified_base 70: mod_base = OTHER; note = 2'-O-methyl nucleotide
  modified_base 71: mod_base = OTHER; note = 2'-O-methyl nucleotide
  modified_base 72: mod_base = OTHER; note = 2'-O-methyl nucleotide
  modified_base 73: mod_base = OTHER; note = 2'-O-methyl nucleotide
  modified_base 74: mod_base = OTHER; note = 2'-O-methyl nucleotide
  modified_base 75: mod_base = OTHER; note = 2'-O-methyl nucleotide
  modified_base 76: mod_base = OTHER; note = 2'-O-methyl nucleotide
  modified_base 77: mod_base = OTHER; note = 2'-O-methyl nucleotide, phosphorothioate linkage
  modified_base 78: mod_base = OTHER; note = 2'-O-methyl nucleotide, phosphorothioate linkage
  modified_base 79: mod_base = OTHER; note = 2'-O-methyl nucleotide, phosphorothioate linkage
  modified_base 80: mod_base = OTHER; note = 2'-O-methyl nucleotide
  source 1..80: mol_type = other RNA

SEQ ID NO: 437 - RNA, 80 nt, synthetic construct; identical to SEQ ID NO: 201
  misc_feature 1..80: note = Synthetic
  modified_base 1: mod_base = OTHER; note = 2'-fluoro modification
  modified_base 2: mod_base = OTHER; note = 2'-fluoro modification
  modified_base 3: mod_base = OTHER; note = 2'-fluoro modification
  modified_base 4: mod_base = OTHER; note = 2'-fluoro modification
  modified_base 5: mod_base = OTHER; note = 2'-fluoro modification
  modified_base 6: mod_base = OTHER; note = 2'-fluoro modification
  modified_base 9: mod_base = OTHER; note = 2'-O-methyl nucleotide
  modified_base 10: mod_base = OTHER; note = 2'-O-methyl nucleotide
  modified_base 11: mod_base = OTHER; note = 2'-O-methyl nucleotide
  modified_base 12: mod_base = OTHER; note = 2'-O-methyl nucleotide
  modified_base 13: mod_base = OTHER; note = 2'-O-methyl nucleotide
  modified_base 14: mod_base = OTHER; note = 2'-O-methyl nucleotide
  modified_base 15: mod_base = OTHER; note = 2'-O-methyl nucleotide
  modified_base 16: mod_base = OTHER; note = 2'-O-methyl nucleotide
  modified_base 17: mod_base = OTHER; note = 2'-O-methyl nucleotide
  modified_base 18: mod_base = OTHER; note = 2'-O-methyl nucleotide
  modified_base 19: mod_base = OTHER; note = 2'-O-methyl nucleotide
  modified_base 20: mod_base = OTHER; note = 2'-O-methyl nucleotide
  modified_base 25: mod_base = OTHER; note = 2'-O-methyl nucleotide
  modified_base 26: mod_base = OTHER; note = 2'-O-methyl nucleotide
  modified_base 27: mod_base = OTHER; note = 2'-fluoro modification
  modified_base 28: mod_base = OTHER; note = 2'-fluoro modification
  modified_base 29: mod_base = OTHER; note = 2'-O-methyl nucleotide
  modified_base 30: mod_base = OTHER; note = 2'-O-methyl nucleotide
  modified_base 49: mod_base = OTHER; note = 2'-O-methyl nucleotide
  modified_base 50: mod_base = OTHER; note = 2'-O-methyl nucleotide
  modified_base 51: mod_base = OTHER; note = 2'-O-methyl nucleotide
  modified_base 52: mod_base = OTHER; note = 2'-O-methyl nucleotide
  modified_base 53: mod_base = OTHER; note = 2'-O-methyl nucleotide
  modified_base 54: mod_base = OTHER; note = 2'-O-methyl nucleotide
  modified_base 55: mod_base = OTHER; note = 2'-O-methyl nucleotide
  modified_base 56: mod_base = OTHER; note = 2'-O-methyl nucleotide
  modified_base 57: mod_base = OTHER; note = 2'-O-methyl nucleotide
  modified_base 58: mod_base = OTHER; note = 2'-O-methyl nucleotide
  modified_base 59: mod_base = OTHER; note = 2'-O-methyl nucleotide
  modified_base 60: mod_base = OTHER; note = 2'-O-methyl nucleotide
  modified_base 61: mod_base = OTHER; note = 2'-O-methyl nucleotide
  modified_base 62: mod_base = OTHER; note = 2'-O-methyl nucleotide
  modified_base 63: mod_base = OTHER; note = 2'-O-methyl nucleotide
  modified_base 64: mod_base = OTHER; note = 2'-O-methyl nucleotide
  modified_base 65: mod_base = OTHER; note = 2'-O-methyl nucleotide
  modified_base 66: mod_base = OTHER; note = 2'-O-methyl nucleotide
  modified_base 67: mod_base = OTHER; note = 2'-O-methyl nucleotide
  modified_base 68: mod_base = OTHER; note = 2'-O-methyl nucleotide
  modified_base 69: mod_base = OTHER; note = 2'-O-methyl nucleotide
  modified_base 70: mod_base = OTHER; note = 2'-O-methyl nucleotide
  modified_base 71: mod_base = OTHER; note = 2'-O-methyl nucleotide
  modified_base 72: mod_base = OTHER; note = 2'-O-methyl nucleotide
  modified_base 73: mod_base = OTHER; note = 2'-O-methyl nucleotide
  modified_base 74: mod_base = OTHER; note = 2'-O-methyl nucleotide
  modified_base 75: mod_base = OTHER; note = 2'-O-methyl nucleotide
  modified_base 76: mod_base = OTHER; note = 2'-O-methyl nucleotide
  modified_base 77: mod_base = OTHER; note = 2'-O-methyl nucleotide, phosphorothioate linkage
  modified_base 78: mod_base = OTHER; note = 2'-O-methyl nucleotide, phosphorothioate linkage
  modified_base 79: mod_base = OTHER; note = 2'-O-methyl nucleotide, phosphorothioate linkage
  modified_base 80: mod_base = OTHER; note = 2'-O-methyl nucleotide
  source 1..80: mol_type = other RNA

SEQ ID NO: 438 - RNA, 80 nt, synthetic construct; identical to SEQ ID NO: 201
  misc_feature 1..80: note = Synthetic
  modified_base 1: mod_base = OTHER; note = 2'-fluoro modification
  modified_base 2: mod_base = OTHER; note = 2'-fluoro modification
  modified_base 3: mod_base = OTHER; note = 2'-fluoro modification
  modified_base 4: mod_base = OTHER; note = 2'-fluoro modification
  modified_base 5: mod_base = OTHER; note = 2'-fluoro modification
  modified_base 6: mod_base = OTHER; note = 2'-fluoro modification
  modified_base 9: mod_base = OTHER; note = 2'-O-methyl nucleotide
  modified_base 10: mod_base = OTHER; note = 2'-O-methyl nucleotide
  modified_base 11: mod_base = OTHER; note = 2'-O-methyl nucleotide
  modified_base 12: mod_base = OTHER; note = 2'-O-methyl nucleotide
  modified_base 13: mod_base = OTHER; note = 2'-O-methyl nucleotide
  modified_base 14: mod_base = OTHER; note = 2'-O-methyl nucleotide
  modified_base 15: mod_base = OTHER; note = 2'-O-methyl nucleotide
  modified_base 16: mod_base = OTHER; note = 2'-O-methyl nucleotide
  modified_base 17: mod_base = OTHER; note = 2'-O-methyl nucleotide
  modified_base 18: mod_base = OTHER; note = 2'-O-methyl nucleotide
  modified_base 19: mod_base = OTHER; note = 2'-O-methyl nucleotide
  modified_base 20: mod_base = OTHER; note = 2'-O-methyl nucleotide
  modified_base 25: mod_base = OTHER; note = 2'-fluoro modification
  modified_base 26: mod_base = OTHER; note = 2'-O-methyl nucleotide
  modified_base 27: mod_base = OTHER; note = 2'-fluoro modification
  modified_base 28: mod_base = OTHER; note = 2'-O-methyl nucleotide
  modified_base 29: mod_base = OTHER; note = 2'-fluoro modification
  modified_base 30: mod_base = OTHER; note = 2'-O-methyl nucleotide
  modified_base 49: mod_base = OTHER; note = 2'-O-methyl nucleotide
  modified_base 50: mod_base = OTHER; note = 2'-O-methyl nucleotide
  modified_base 51: mod_base = OTHER; note = 2'-O-methyl nucleotide
  modified_base 52: mod_base = OTHER; note = 2'-O-methyl nucleotide
  modified_base 53: mod_base = OTHER; note = 2'-O-methyl nucleotide
  modified_base 54: mod_base = OTHER; note = 2'-O-methyl nucleotide
  modified_base 55: mod_base = OTHER; note = 2'-O-methyl nucleotide
  modified_base 56: mod_base = OTHER; note = 2'-O-methyl nucleotide
  modified_base 57: mod_base = OTHER; note = 2'-O-methyl nucleotide
  modified_base 58: mod_base = OTHER; note = 2'-O-methyl nucleotide
  modified_base 59: mod_base = OTHER; note = 2'-O-methyl nucleotide
  modified_base 60: mod_base = OTHER; note = 2'-O-methyl nucleotide
  modified_base 61: mod_base = OTHER; note = 2'-O-methyl nucleotide
  modified_base 62: mod_base = OTHER; note = 2'-O-methyl nucleotide
  modified_base 63: mod_base = OTHER; note = 2'-O-methyl nucleotide
  modified_base 64: mod_base = OTHER; note = 2'-O-methyl nucleotide
  modified_base 65: mod_base = OTHER; note = 2'-O-methyl nucleotide
  modified_base 66: mod_base = OTHER; note = 2'-O-methyl nucleotide
  modified_base 67: mod_base = OTHER; note = 2'-O-methyl nucleotide
  modified_base 68: mod_base = OTHER; note = 2'-O-methyl nucleotide
  modified_base 69: mod_base = OTHER; note = 2'-O-methyl nucleotide
  modified_base 70: mod_base = OTHER; note = 2'-O-methyl nucleotide
  modified_base 71: mod_base = OTHER; note = 2'-O-methyl nucleotide
  modified_base 72: mod_base = OTHER; note = 2'-O-methyl nucleotide
  modified_base 73: mod_base = OTHER; note = 2'-O-methyl nucleotide
  modified_base 74: mod_base = OTHER; note = 2'-O-methyl nucleotide
  modified_base 75: mod_base = OTHER; note = 2'-O-methyl nucleotide
  modified_base 76: mod_base = OTHER; note = 2'-O-methyl nucleotide
  modified_base 77: mod_base = OTHER; note = 2'-O-methyl nucleotide, phosphorothioate linkage
  modified_base 78: mod_base = OTHER; note = 2'-O-methyl nucleotide, phosphorothioate linkage
  modified_base 79: mod_base = OTHER; note = 2'-O-methyl nucleotide, phosphorothioate linkage
  modified_base 80: mod_base = OTHER; note = 2'-O-methyl nucleotide
  source 1..80: mol_type = other RNA

SEQ ID NO: 439 - RNA, 80 nt, synthetic construct; identical to SEQ ID NO: 201
  misc_feature 1..80: note = Synthetic
  modified_base 7: mod_base = OTHER; note = 2'-O-methyl nucleotide
  modified_base 8: mod_base = OTHER; note = 2'-O-methyl nucleotide
  modified_base 9: mod_base = OTHER; note = 2'-O-methyl nucleotide
  modified_base 10: mod_base = OTHER; note = 2'-O-methyl nucleotide
  modified_base 11: mod_base = OTHER; note = 2'-O-methyl nucleotide
  modified_base 12: mod_base = OTHER; note = 2'-O-methyl nucleotide
  modified_base 13: mod_base = OTHER; note = 2'-O-methyl nucleotide
  modified_base 14: mod_base = OTHER; note = 2'-O-methyl nucleotide
  modified_base 15: mod_base = OTHER; note = 2'-O-methyl nucleotide
  modified_base 16: mod_base = OTHER; note = 2'-O-methyl nucleotide
  modified_base 17: mod_base = OTHER; note = 2'-O-methyl nucleotide
  modified_base 18: mod_base = OTHER; note = 2'-O-methyl nucleotide
  modified_base 19: mod_base = OTHER; note = 2'-O-methyl nucleotide
  modified_base 20: mod_base = OTHER; note = 2'-O-methyl nucleotide
  modified_base 49: mod_base = OTHER; note = 2'-O-methyl nucleotide
  modified_base 50: mod_base = OTHER; note = 2'-O-methyl nucleotide
  modified_base 51: mod_base = OTHER; note = 2'-O-methyl nucleotide
  modified_base 52: mod_base = OTHER; note = 2'-O-methyl nucleotide
  modified_base 53: mod_base = OTHER; note = 2'-O-methyl nucleotide
  modified_base 54: mod_base = OTHER; note = 2'-O-methyl nucleotide
  modified_base 55: mod_base = OTHER; note = 2'-O-methyl nucleotide
  modified_base 56: mod_base = OTHER; note = 2'-O-methyl nucleotide
  modified_base 57: mod_base = OTHER; note = 2'-O-methyl nucleotide
  modified_base 58: mod_base = OTHER; note = 2'-O-methyl nucleotide
  modified_base 59: mod_base = OTHER; note = 2'-O-methyl nucleotide
  modified_base 60: mod_base = OTHER; note = 2'-O-methyl nucleotide
  modified_base 61: mod_base = OTHER; note = 2'-O-methyl nucleotide
  modified_base 62: mod_base = OTHER; note = 2'-O-methyl nucleotide
  modified_base 63: mod_base = OTHER; note = 2'-O-methyl nucleotide
  modified_base 64: mod_base = OTHER; note = 2'-O-methyl nucleotide
  modified_base 65: mod_base = OTHER; note = 2'-O-methyl nucleotide
  modified_base 66: mod_base = OTHER; note = 2'-O-methyl nucleotide
  modified_base 67: mod_base = OTHER; note = 2'-O-methyl nucleotide
  modified_base 68: mod_base = OTHER; note = 2'-O-methyl nucleotide
  modified_base 69: mod_base = OTHER; note = 2'-O-methyl nucleotide
  modified_base 70: mod_base = OTHER; note = 2'-O-methyl nucleotide
  modified_base 71: mod_base = OTHER; note = 2'-O-methyl nucleotide
  modified_base 72: mod_base = OTHER; note = 2'-O-methyl nucleotide
  modified_base 73: mod_base = OTHER; note = 2'-O-methyl nucleotide
  modified_base 74: mod_base = OTHER; note = 2'-O-methyl nucleotide
  modified_base 75: mod_base = OTHER; note = 2'-O-methyl nucleotide
  modified_base 76: mod_base = OTHER; note = 2'-O-methyl nucleotide
  modified_base 77: mod_base = OTHER; note = 2'-O-methyl nucleotide, phosphorothioate linkage
  modified_base 78: mod_base = OTHER; note = 2'-O-methyl nucleotide, phosphorothioate linkage
  modified_base 79: mod_base = OTHER; note = 2'-O-methyl nucleotide, phosphorothioate linkage
  modified_base 80: mod_base = OTHER; note = 2'-O-methyl nucleotide
  source 1..80: mol_type = other RNA

SEQ ID NO: 440 - RNA, 80 nt, synthetic construct; identical to SEQ ID NO: 201
  misc_feature 1..80: note = Synthetic
  modified_base 9: mod_base = OTHER; note = 2'-O-methyl nucleotide
  modified_base 10: mod_base = OTHER; note = 2'-O-methyl nucleotide
  modified_base 11: mod_base = OTHER; note = 2'-O-methyl nucleotide
  modified_base 12: mod_base = OTHER; note = 2'-O-methyl nucleotide
  modified_base 13: mod_base = OTHER; note = 2'-O-methyl nucleotide
  modified_base 14: mod_base = OTHER; note = 2'-O-methyl nucleotide
  modified_base 15: mod_base = OTHER; note = 2'-O-methyl nucleotide
  modified_base 16: mod_base = OTHER; note = 2'-O-methyl nucleotide
  modified_base 17: mod_base = OTHER; note = 2'-O-methyl nucleotide
  modified_base 18: mod_base = OTHER; note = 2'-O-methyl nucleotide
  modified_base 19: mod_base = OTHER; note = 2'-O-methyl nucleotide
  modified_base 20: mod_base = OTHER; note = 2'-O-methyl nucleotide
  modified_base 21: mod_base = OTHER; note = 2'-O-methyl nucleotide
  modified_base 22: mod_base = OTHER; note = 2'-O-methyl nucleotide
  modified_base 23: mod_base = OTHER; note = 2'-O-methyl nucleotide
  modified_base 24: mod_base = OTHER; note = 2'-O-methyl nucleotide
  modified_base 49: mod_base = OTHER; note = 2'-O-methyl nucleotide
  modified_base 50: mod_base = OTHER; note = 2'-O-methyl nucleotide
  modified_base 51: mod_base = OTHER; note = 2'-O-methyl nucleotide
  modified_base 52: mod_base = OTHER; note = 2'-O-methyl nucleotide
  modified_base 53: mod_base = OTHER; note = 2'-O-methyl nucleotide
  modified_base 54: mod_base = OTHER; note = 2'-O-methyl nucleotide
  modified_base 55: mod_base = OTHER; note = 2'-O-methyl nucleotide
  modified_base 56: mod_base = OTHER; note = 2'-O-methyl nucleotide
  modified_base 57: mod_base = OTHER; note = 2'-O-methyl nucleotide
  modified_base 58: mod_base = OTHER; note = 2'-O-methyl nucleotide
  modified_base 59: mod_base = OTHER; note = 2'-O-methyl nucleotide
  modified_base 60: mod_base = OTHER; note = 2'-O-methyl nucleotide
  modified_base 61: mod_base = OTHER; note = 2'-O-methyl nucleotide
  modified_base 62: mod_base = OTHER; note = 2'-O-methyl nucleotide
  modified_base 63: mod_base = OTHER; note = 2'-O-methyl nucleotide
  modified_base 64: mod_base = OTHER; note = 2'-O-methyl nucleotide
  modified_base 65: mod_base = OTHER; note = 2'-O-methyl nucleotide
  modified_base 66: mod_base = OTHER; note = 2'-O-methyl nucleotide
  modified_base 67: mod_base = OTHER; note = 2'-O-methyl nucleotide
  modified_base 68: mod_base = OTHER; note = 2'-O-methyl nucleotide
  modified_base 69: mod_base = OTHER; note = 2'-O-methyl nucleotide
  modified_base 70: mod_base = OTHER; note = 2'-O-methyl nucleotide
  modified_base 71: mod_base = OTHER; note = 2'-O-methyl nucleotide
  modified_base 72: mod_base = OTHER; note = 2'-O-methyl nucleotide
  modified_base 73: mod_base = OTHER; note = 2'-O-methyl nucleotide
  modified_base 74: mod_base = OTHER; note = 2'-O-methyl nucleotide
  modified_base 75: mod_base = OTHER; note = 2'-O-methyl nucleotide
  modified_base 76: mod_base = OTHER; note = 2'-O-methyl nucleotide
  modified_base 77: mod_base = OTHER; note = 2'-O-methyl nucleotide, phosphorothioate linkage
  modified_base 78: mod_base = OTHER; note = 2'-O-methyl nucleotide, phosphorothioate linkage
  modified_base 79: mod_base = OTHER; note = 2'-O-methyl nucleotide, phosphorothioate linkage
  modified_base 80: mod_base = OTHER; note = 2'-O-methyl nucleotide
  source 1..80: mol_type = other RNA

SEQ ID NO: 441 - RNA, 80 nt, synthetic construct; identical to SEQ ID NO: 201
  misc_feature 1..80: note = Synthetic
  modified_base 9: mod_base = OTHER; note = 2'-O-methyl nucleotide
  modified_base 10: mod_base = OTHER; note = 2'-O-methyl nucleotide
  modified_base 11: mod_base = OTHER; note = 2'-O-methyl nucleotide
  modified_base 12: mod_base = OTHER; note = 2'-O-methyl nucleotide
  modified_base 13: mod_base = OTHER; note = 2'-O-methyl nucleotide
  modified_base 14: mod_base = OTHER; note = 2'-O-methyl nucleotide
  modified_base 15: mod_base = OTHER; note = 2'-O-methyl nucleotide
  modified_base 16: mod_base = OTHER; note = 2'-O-methyl nucleotide
  modified_base 17: mod_base = OTHER; note = 2'-O-methyl nucleotide
  modified_base 18: mod_base = OTHER; note = 2'-O-methyl nucleotide
  modified_base 19: mod_base = OTHER; note = 2'-O-methyl nucleotide
  modified_base 20: mod_base = OTHER; note = 2'-O-methyl nucleotide
  modified_base 45: mod_base = OTHER; note = 2'-fluoro modification
  modified_base 46: mod_base = OTHER; note = 2'-fluoro modification
  modified_base 47: mod_base = OTHER; note = 2'-fluoro modification
  modified_base 48: mod_base = OTHER; note = 2'-fluoro modification
  modified_base 49: mod_base = OTHER; note = 2'-O-methyl nucleotide
  modified_base 50: mod_base = OTHER; note = 2'-O-methyl nucleotide
  modified_base 51: mod_base = OTHER; note = 2'-O-methyl nucleotide
  modified_base 52: mod_base = OTHER; note = 2'-O-methyl nucleotide
  modified_base 53: mod_base = OTHER; note = 2'-O-methyl nucleotide
  modified_base 54: mod_base = OTHER; note = 2'-O-methyl nucleotide
  modified_base 55: mod_base = OTHER; note = 2'-O-methyl nucleotide
  modified_base 56: mod_base = OTHER; note = 2'-O-methyl nucleotide
  modified_base 57: mod_base = OTHER; note = 2'-O-methyl nucleotide
  modified_base 58: mod_base = OTHER; note = 2'-O-methyl nucleotide
  modified_base 59: mod_base = OTHER; note = 2'-O-methyl nucleotide
  modified_base 60: mod_base = OTHER; note = 2'-O-methyl nucleotide
  modified_base 61: mod_base = OTHER; note = 2'-O-methyl nucleotide
  modified_base 62: mod_base = OTHER; note = 2'-O-methyl nucleotide
  modified_base 63: mod_base = OTHER; note = 2'-O-methyl nucleotide
  modified_base 64: mod_base = OTHER; note = 2'-O-methyl nucleotide
  modified_base 65: mod_base = OTHER; note = 2'-O-methyl nucleotide
  modified_base 66: mod_base = OTHER; note = 2'-O-methyl nucleotide
  modified_base 67: mod_base = OTHER; note = 2'-O-methyl nucleotide
  modified_base 68: mod_base = OTHER; note = 2'-O-methyl nucleotide
  modified_base 69: mod_base = OTHER; note = 2'-O-methyl nucleotide
  modified_base 70: mod_base = OTHER; note = 2'-O-methyl nucleotide
  modified_base 71: mod_base = OTHER; note = 2'-O-methyl nucleotide
  modified_base 72: mod_base = OTHER; note = 2'-O-methyl nucleotide
  modified_base 73: mod_base = OTHER; note = 2'-O-methyl nucleotide
  modified_base 74: mod_base = OTHER; note = 2'-O-methyl nucleotide
  modified_base 75: mod_base = OTHER; note = 2'-O-methyl nucleotide
  modified_base 76: mod_base = OTHER; note = 2'-O-methyl nucleotide
  modified_base 77: mod_base = OTHER; note = 2'-O-methyl nucleotide, phosphorothioate linkage
  modified_base 78: mod_base = OTHER; note = 2'-O-methyl nucleotide, phosphorothioate linkage
  modified_base 79: mod_base = OTHER; note = 2'-O-methyl nucleotide, phosphorothioate linkage
  modified_base 80: mod_base = OTHER; note = 2'-O-methyl nucleotide
  source 1..80: mol_type = other RNA

SEQ ID NO: 442 - RNA, 80 nt, synthetic construct; identical to SEQ ID NO: 201
  misc_feature 1..80: note = Synthetic
  modified_base 9: mod_base = OTHER; note = 2'-O-methyl nucleotide
  modified_base 10: mod_base = OTHER; note = 2'-O-methyl nucleotide
  modified_base 11: mod_base = OTHER; note = 2'-O-methyl nucleotide
  modified_base 12: mod_base = OTHER; note = 2'-O-methyl nucleotide
  modified_base 13: mod_base = OTHER; note = 2'-O-methyl nucleotide
  modified_base 14: mod_base = OTHER; note = 2'-O-methyl nucleotide
  modified_base 15: mod_base = OTHER; note = 2'-O-methyl nucleotide
  modified_base 16: mod_base = OTHER; note = 2'-O-methyl nucleotide
  modified_base 17: mod_base = OTHER; note = 2'-O-methyl nucleotide
  modified_base 18: mod_base = OTHER; note = 2'-O-methyl nucleotide
  modified_base 19: mod_base = OTHER; note = 2'-O-methyl nucleotide
  modified_base 20: mod_base = OTHER; note = 2'-O-methyl nucleotide
  modified_base 46: mod_base = OTHER; note = 2'-O-methyl nucleotide
  modified_base 47: mod_base = OTHER; note = 2'-O-methyl nucleotide
  modified_base 48: mod_base = OTHER; note = 2'-O-methyl nucleotide
  modified_base 49: mod_base = OTHER; note = 2'-O-methyl nucleotide
  modified_base 50: mod_base = OTHER; note = 2'-O-methyl nucleotide
  modified_base 51: mod_base = OTHER; note = 2'-O-methyl nucleotide
  modified_base 52: mod_base = OTHER; note = 2'-O-methyl nucleotide
  modified_base 53: mod_base = OTHER; note = 2'-O-methyl nucleotide
  modified_base 54: mod_base = OTHER; note = 2'-O-methyl nucleotide
  modified_base 55: mod_base = OTHER; note = 2'-O-methyl nucleotide
  modified_base 56: mod_base = OTHER; note = 2'-O-methyl nucleotide
  modified_base 57: mod_base = OTHER; note = 2'-O-methyl nucleotide
  modified_base 58: mod_base = OTHER; note = 2'-O-methyl nucleotide
  modified_base 59: mod_base = OTHER; note = 2'-O-methyl nucleotide
  modified_base 60: mod_base = OTHER; note = 2'-O-methyl nucleotide
  modified_base 61: mod_base = OTHER; note = 2'-O-methyl nucleotide
  modified_base 62: mod_base = OTHER; note = 2'-O-methyl nucleotide
  modified_base 63: mod_base = OTHER; note = 2'-O-methyl nucleotide
  modified_base 64: mod_base = OTHER; note = 2'-O-methyl nucleotide
  modified_base 65: mod_base = OTHER; note = 2'-O-methyl nucleotide
  modified_base 66: mod_base = OTHER; note = 2'-O-methyl nucleotide
  modified_base 67: mod_base = OTHER; note = 2'-O-methyl nucleotide
  modified_base 68: mod_base = OTHER; note = 2'-O-methyl nucleotide
  modified_base 69: mod_base = OTHER; note = 2'-O-methyl nucleotide
  modified_base 70: mod_base = OTHER; note = 2'-O-methyl nucleotide
  modified_base 71: mod_base = OTHER; note = 2'-O-methyl nucleotide
  modified_base 72: mod_base = OTHER; note = 2'-O-methyl nucleotide
  modified_base 73: mod_base = OTHER; note = 2'-O-methyl nucleotide
  modified_base 74: mod_base = OTHER; note = 2'-O-methyl nucleotide
  modified_base 75: mod_base = OTHER; note = 2'-O-methyl nucleotide
  modified_base 76: mod_base = OTHER; note = 2'-O-methyl nucleotide
  modified_base 77: mod_base = OTHER; note = 2'-O-methyl nucleotide, phosphorothioate linkage
  modified_base 78: mod_base = OTHER; note = 2'-O-methyl nucleotide, phosphorothioate linkage
  modified_base 79: mod_base = OTHER; note = 2'-O-methyl nucleotide, phosphorothioate linkage
  modified_base 80: mod_base = OTHER; note = 2'-O-methyl nucleotide
  source 1..80: mol_type = other RNA

SEQ ID NO: 443 - RNA, 80 nt, synthetic construct; identical to SEQ ID NO: 201
  misc_feature 1..80: note = Synthetic
  modified_base 1: mod_base = OTHER; note = 2'-fluoro modification
  modified_base 2: mod_base = OTHER; note = 2'-fluoro modification
  modified_base 3: mod_base = OTHER; note = 2'-fluoro modification
  modified_base 4: mod_base = OTHER; note = 2'-fluoro modification
  modified_base 5: mod_base = OTHER; note = 2'-fluoro modification
  modified_base 6: mod_base = OTHER; note = 2'-fluoro modification
  modified_base 7: mod_base = OTHER; note = 2'-O-methyl nucleotide
  modified_base 8: mod_base = OTHER; note = 2'-O-methyl nucleotide
  modified_base 9: mod_base = OTHER; note = 2'-O-methyl nucleotide
  modified_base 10: mod_base = OTHER; note = 2'-O-methyl nucleotide
  modified_base 11: mod_base = OTHER; note = 2'-O-methyl nucleotide
  modified_base 12: mod_base = OTHER; note = 2'-O-methyl nucleotide
  modified_base 13: mod_base = OTHER; note = 2'-O-methyl nucleotide
  modified_base 14: mod_base = OTHER; note = 2'-O-methyl nucleotide
  modified_base 15: mod_base = OTHER; note = 2'-O-methyl nucleotide
  modified_base 16: mod_base = OTHER; note = 2'-O-methyl nucleotide
  modified_base 17: mod_base = OTHER; note = 2'-O-methyl nucleotide
  modified_base 18: mod_base = OTHER; note = 2'-O-methyl nucleotide
  modified_base 19: mod_base = OTHER; note = 2'-O-methyl nucleotide
  modified_base 20: mod_base = OTHER; note = 2'-O-methyl nucleotide
  modified_base 21: mod_base = OTHER; note = 2'-O-methyl nucleotide
  modified_base 22: mod_base = OTHER; note = 2'-O-methyl nucleotide
  modified_base 23: mod_base = OTHER; note = 2'-O-methyl nucleotide
  modified_base 24: mod_base = OTHER; note = 2'-O-methyl nucleotide
  modified_base 25: mod_base = OTHER; note = 2'-O-methyl nucleotide
  modified_base 26: mod_base = OTHER; note = 2'-O-methyl nucleotide
  modified_base 27: mod_base = OTHER; note = 2'-fluoro modification
  modified_base 28: mod_base = OTHER; note = 2'-fluoro modification
  modified_base 29: mod_base = OTHER; note = 2'-O-methyl nucleotide
  modified_base 30: mod_base = OTHER; note = 2'-O-methyl nucleotide
  modified_base 46: mod_base = OTHER; note = 2'-O-methyl nucleotide
  modified_base 47: mod_base = OTHER; note = 2'-O-methyl nucleotide
  modified_base 48: mod_base = OTHER; note = 2'-O-methyl nucleotide
  modified_base 49: mod_base = OTHER; note = 2'-O-methyl nucleotide
  modified_base 50: mod_base = OTHER; note = 2'-O-methyl nucleotide
  modified_base 51: mod_base = OTHER; note = 2'-O-methyl nucleotide
  modified_base 52: mod_base = OTHER; note = 2'-O-methyl nucleotide
  modified_base 53: mod_base = OTHER; note = 2'-O-methyl nucleotide
  modified_base 54: mod_base = OTHER; note = 2'-O-methyl nucleotide
  modified_base 55: mod_base = OTHER; note = 2'-O-methyl nucleotide
  modified_base 56: mod_base = OTHER; note = 2'-O-methyl nucleotide
  modified_base 57: mod_base = OTHER; note = 2'-O-methyl nucleotide
  modified_base 58: mod_base = OTHER; note = 2'-O-methyl nucleotide
  modified_base 59: mod_base = OTHER; note = 2'-O-methyl nucleotide
  modified_base 60: mod_base = OTHER; note = 2'-O-methyl nucleotide
  modified_base 61: mod_base = OTHER; note = 2'-O-methyl nucleotide
  modified_base 62: mod_base = OTHER; note = 2'-O-methyl nucleotide
  modified_base 63: mod_base = OTHER; note = 2'-O-methyl nucleotide
  modified_base 64: mod_base = OTHER; note = 2'-O-methyl nucleotide
  modified_base 65: mod_base = OTHER; note = 2'-O-methyl nucleotide
  modified_base 66: mod_base = OTHER; note = 2'-O-methyl nucleotide
  modified_base 67: mod_base = OTHER; note = 2'-O-methyl nucleotide
  modified_base 68: mod_base = OTHER; note = 2'-O-methyl nucleotide
  modified_base 69: mod_base = OTHER; note = 2'-O-methyl nucleotide
  modified_base 70: mod_base = OTHER; note = 2'-O-methyl nucleotide
  modified_base 71: mod_base = OTHER; note = 2'-O-methyl nucleotide
  modified_base 72: mod_base = OTHER; note = 2'-O-methyl nucleotide
  modified_base 73: mod_base = OTHER; note = 2'-O-methyl nucleotide
  modified_base 74: mod_base = OTHER; note = 2'-O-methyl nucleotide
  modified_base 75: mod_base = OTHER; note = 2'-O-methyl nucleotide
  modified_base 76: mod_base = OTHER; note = 2'-O-methyl nucleotide
  modified_base 77: mod_base = OTHER; note = 2'-O-methyl nucleotide, phosphorothioate linkage
  modified_base 78: mod_base = OTHER; note = 2'-O-methyl nucleotide, phosphorothioate linkage
  modified_base 79: mod_base = OTHER; note = 2'-O-methyl nucleotide, phosphorothioate linkage
  modified_base 80: mod_base = OTHER; note = 2'-O-methyl nucleotide
  source 1..80: mol_type = other RNA

SEQ ID NO: 444 - RNA, 80 nt, synthetic construct; identical to SEQ ID NO: 201
  misc_feature 1..80: note = Synthetic
  modified_base 9: mod_base = OTHER; note = 2'-O-methyl nucleotide
  modified_base 10: mod_base = OTHER; note = 2'-O-methyl nucleotide
  modified_base 11: mod_base = OTHER; note = 2'-O-methyl nucleotide
  modified_base 12: mod_base = OTHER; note = 2'-O-methyl nucleotide
  modified_base 13: mod_base = OTHER; note = 2'-O-methyl nucleotide
  modified_base 14: mod_base = OTHER; note = 2'-O-methyl nucleotide
  modified_base 15: mod_base = OTHER; note = 2'-O-methyl nucleotide
  modified_base 16: mod_base = OTHER; note = 2'-O-methyl nucleotide
  modified_base 17: mod_base = OTHER; note = 2'-O-methyl nucleotide
  modified_base 18: mod_base = OTHER; note = 2'-O-methyl nucleotide
  modified_base 19: mod_base = OTHER; note = 2'-O-methyl nucleotide
  modified_base 20: mod_base = OTHER; note = 2'-O-methyl nucleotide
  modified_base 49: mod_base = OTHER; note = 2'-O-methyl nucleotide
  modified_base 50: mod_base = OTHER; note = 2'-O-methyl nucleotide
  modified_base 51: mod_base = OTHER; note = 2'-O-methyl nucleotide
  modified_base 52: mod_base = OTHER; note = 2'-O-methyl nucleotide
  modified_base 53: mod_base = OTHER; note = 2'-O-methyl nucleotide
  modified_base 54: mod_base = OTHER; note = 2'-O-methyl nucleotide
  modified_base 55: mod_base = OTHER; note = 2'-O-methyl nucleotide
  modified_base 56: mod_base = OTHER; note = 2'-O-methyl nucleotide
  modified_base 57: mod_base = OTHER; note = 2'-O-methyl nucleotide
  modified_base 58: mod_base = OTHER; note = 2'-O-methyl nucleotide
  modified_base 59: mod_base = OTHER; note = 2'-O-methyl nucleotide
  modified_base 60: mod_base = OTHER; note = 2'-O-methyl nucleotide
  modified_base 61: mod_base = OTHER; note = 2'-O-methyl nucleotide
  modified_base 62: mod_base = OTHER; note = 2'-O-methyl nucleotide
  modified_base 63: mod_base = OTHER; note = 2'-O-methyl nucleotide
  modified_base 64: mod_base = OTHER; note = 2'-O-methyl nucleotide
  modified_base 65: mod_base = OTHER; note = 2'-O-methyl nucleotide
  modified_base 66: mod_base = OTHER; note = 2'-O-methyl nucleotide
  modified_base 67: mod_base = OTHER; note = 2'-O-methyl nucleotide
  modified_base 68: mod_base = OTHER; note = 2'-O-methyl nucleotide
  modified_base 69: mod_base = OTHER; note = 2'-O-methyl nucleotide
  modified_base 70: mod_base = OTHER; note = 2'-O-methyl nucleotide
  modified_base 71: mod_base = OTHER; note = 2'-O-methyl nucleotide
  modified_base 72: mod_base = OTHER; note = 2'-O-methyl nucleotide
  modified_base 73: mod_base = OTHER; note = 2'-O-methyl nucleotide
  modified_base 74: mod_base = OTHER; note = 2'-O-methyl nucleotide
  modified_base 75: mod_base = OTHER; note = 2'-O-methyl nucleotide
  modified_base 76: mod_base = OTHER; note = 2'-O-methyl nucleotide
  modified_base 77: mod_base = OTHER; note = 2'-O-methyl nucleotide
  modified_base 78: mod_base = OTHER; note = 2'-O-methyl nucleotide
  modified_base 79: mod_base = OTHER; note = 2'-O-methyl nucleotide
  modified_base 80: mod_base = OTHER; note = 2'-O-methyl nucleotide
  source 1..80: mol_type = other RNA

SEQ ID NO: 445 - RNA, 80 nt, synthetic construct; identical to SEQ ID NO: 201
  misc_feature 1..80: note = Synthetic
  modified_base 9: mod_base = OTHER; note = 2'-O-methyl nucleotide
  modified_base 10: mod_base = OTHER; note = 2'-O-methyl nucleotide
  modified_base 11: mod_base = OTHER; note = 2'-O-methyl nucleotide
  modified_base 12: mod_base = OTHER; note = 2'-O-methyl nucleotide
  modified_base 13: mod_base = OTHER; note = 2'-O-methyl nucleotide
  modified_base 14: mod_base = OTHER; note = 2'-O-methyl nucleotide
  modified_base 15: mod_base = OTHER; note = 2'-O-methyl nucleotide
  modified_base 16: mod_base = OTHER; note = 2'-O-methyl nucleotide
  modified_base 17: mod_base = OTHER; note = 2'-O-methyl nucleotide
  modified_base 18: mod_base = OTHER; note = 2'-O-methyl nucleotide
  modified_base 19: mod_base = OTHER; note = 2'-O-methyl nucleotide
  modified_base 20: mod_base = OTHER; note = 2'-O-methyl nucleotide
  modified_base 49: mod_base = OTHER; note = 2'-O-methyl nucleotide
  modified_base 50: mod_base = OTHER; note = 2'-O-methyl nucleotide
  modified_base 51: mod_base = OTHER; note = 2'-O-methyl nucleotide
  modified_base 52: mod_base = OTHER; note = 2'-O-methyl nucleotide
  modified_base 53: mod_base = OTHER; note = 2'-O-methyl nucleotide
  modified_base 54: mod_base = OTHER; note = 2'-O-methyl nucleotide
  modified_base 55: mod_base = OTHER; note = 2'-O-methyl nucleotide
  modified_base 56: mod_base = OTHER; note = 2'-O-methyl nucleotide
  modified_base 57: mod_base = OTHER; note = 2'-O-methyl nucleotide
  modified_base 58: mod_base = OTHER; note = 2'-O-methyl nucleotide
  modified_base 59: mod_base = OTHER; note = 2'-O-methyl nucleotide
  modified_base 60: mod_base = OTHER; note = 2'-O-methyl nucleotide
  modified_base 61: mod_base = OTHER; note = 2'-O-methyl nucleotide
  modified_base 62: mod_base = OTHER; note = 2'-O-methyl nucleotide
  modified_base 63: mod_base = OTHER; note = 2'-O-methyl nucleotide
  modified_base 64: mod_base = OTHER; note = 2'-O-methyl nucleotide
  modified_base 65: mod_base = OTHER; note = 2'-O-methyl nucleotide
  modified_base 66: mod_base = OTHER; note = 2'-O-methyl nucleotide
  modified_base 67: mod_base = OTHER; note = 2'-O-methyl nucleotide
  modified_base 68: mod_base = OTHER; note = 2'-O-methyl nucleotide
  modified_base 69: mod_base = OTHER; note = 2'-O-methyl nucleotide
  modified_base 70: mod_base = OTHER; note = 2'-O-methyl nucleotide
  modified_base 71: mod_base = OTHER; note = 2'-O-methyl nucleotide
  modified_base 72: mod_base = OTHER; note = 2'-O-methyl nucleotide
  modified_base 73: mod_base = OTHER; note = 2'-O-methyl nucleotide
  modified_base 74: mod_base = OTHER; note = 2'-O-methyl nucleotide
  modified_base 75: mod_base = OTHER; note = 2'-O-methyl nucleotide
  modified_base 76: mod_base = OTHER; note = 2'-O-methyl nucleotide
  modified_base 77: mod_base = OTHER; note = 2'-O-methyl nucleotide
  modified_base 78: mod_base = OTHER; note = 2'-O-methyl nucleotide, phosphorothioate linkage
  modified_base 79: mod_base = OTHER; note = 2'-O-methyl nucleotide, phosphorothioate linkage
  modified_base 80: mod_base = OTHER; note = 2'-O-methyl nucleotide
  source 1..80: mol_type = other RNA

SEQ ID NO: 446 - RNA, 80 nt, synthetic construct; identical to SEQ ID NO: 201
  misc_feature 1..80: note = Synthetic
  modified_base 9: mod_base = OTHER; note = 2'-O-methyl nucleotide
  modified_base 10: mod_base = OTHER; note = 2'-O-methyl nucleotide
  modified_base 11: mod_base = OTHER; note = 2'-O-methyl nucleotide
  modified_base 12: mod_base = OTHER; note = 2'-O-methyl nucleotide
  modified_base 13: mod_base = OTHER; note = 2'-O-methyl nucleotide
  modified_base 14: mod_base = OTHER; note = 2'-O-methyl nucleotide
  modified_base 15: mod_base = OTHER; note = 2'-O-methyl nucleotide
  modified_base 16: mod_base = OTHER; note = 2'-O-methyl nucleotide
  modified_base 17: mod_base = OTHER; note = 2'-O-methyl nucleotide
  modified_base 18: mod_base = OTHER; note = 2'-O-methyl nucleotide
  modified_base 19: mod_base = OTHER; note = 2'-O-methyl nucleotide
  modified_base 20: mod_base = OTHER; note = 2'-O-methyl nucleotide
  modified_base 49: mod_base = OTHER; note = 2'-O-methyl nucleotide
  modified_base 50: mod_base = OTHER; note = 2'-O-methyl nucleotide
  modified_base 51: mod_base = OTHER; note = 2'-O-methyl nucleotide
  modified_base 52: mod_base = OTHER; note = 2'-O-methyl nucleotide
  modified_base 53: mod_base = OTHER; note = 2'-O-methyl nucleotide
  modified_base 54: mod_base = OTHER; note = 2'-O-methyl nucleotide
  modified_base 55: mod_base = OTHER; note = 2'-O-methyl nucleotide
  modified_base 56: mod_base = OTHER; note = 2'-O-methyl nucleotide
  modified_base 57: mod_base = OTHER; note = 2'-O-methyl nucleotide
  modified_base 58: mod_base = OTHER; note = 2'-O-methyl nucleotide
  modified_base 59: mod_base = OTHER; note = 2'-O-methyl nucleotide
  modified_base 60: mod_base = OTHER; note = 2'-O-methyl nucleotide
  modified_base 61: mod_base = OTHER; note = 2'-O-methyl nucleotide
  modified_base 62: mod_base = OTHER; note = 2'-O-methyl nucleotide
  modified_base 63: mod_base = OTHER; note = 2'-O-methyl nucleotide
  modified_base 64: mod_base = OTHER; note = 2'-O-methyl nucleotide
  modified_base 65: mod_base = OTHER; note = 2'-O-methyl nucleotide
  modified_base 66: mod_base = OTHER; note = 2'-O-methyl nucleotide
  modified_base 67: mod_base = OTHER; note = 2'-O-methyl nucleotide
  modified_base 68: mod_base = OTHER; note = 2'-O-methyl nucleotide
  modified_base 69: mod_base = OTHER; note = 2'-O-methyl nucleotide
  modified_base 70: mod_base = OTHER; note = 2'-fluoro modification
  modified_base 71: mod_base = OTHER; note = 2'-fluoro modification
  modified_base 72: mod_base = OTHER; note = 2'-fluoro modification
  modified_base 73: mod_base = OTHER; note = 2'-fluoro modification
  modified_base 74: mod_base = OTHER; note = 2'-fluoro modification
  modified_base 75: mod_base = OTHER; note = 2'-fluoro modification
  modified_base 76: mod_base = OTHER; note = 2'-fluoro modification
  modified_base 77: mod_base = OTHER; note = 2'-fluoro modification, phosphorothioate linkage
  modified_base 78: mod_base = OTHER; note = 2'-fluoro modification, phosphorothioate linkage
  modified_base 79: mod_base = OTHER; note = 2'-fluoro modification, phosphorothioate linkage
  modified_base 80: mod_base = OTHER; note = 2'-O-methyl nucleotide
  source 1..80: mol_type = other RNA

SEQ ID NO: 447 - RNA, 80 nt, synthetic construct; identical to SEQ ID NO: 201
  misc_feature 1..80: note = Synthetic
  modified_base 9: mod_base = OTHER; note = 2'-O-methyl nucleotide
  modified_base 10: mod_base = OTHER; note = 2'-O-methyl nucleotide
  modified_base 11: mod_base = OTHER; note = 2'-O-methyl nucleotide
  modified_base 12: mod_base = OTHER; note = 2'-O-methyl nucleotide
  modified_base 13: mod_base = OTHER; note = 2'-O-methyl nucleotide
  modified_base 14: mod_base = OTHER; note = 2'-O-methyl nucleotide
  modified_base 15: mod_base = OTHER; note = 2'-O-methyl nucleotide
  modified_base 16: mod_base = OTHER; note = 2'-O-methyl nucleotide
  modified_base 17: mod_base = OTHER; note = 2'-O-methyl nucleotide
  modified_base 18: mod_base = OTHER; note = 2'-O-methyl nucleotide
  modified_base 19: mod_base = OTHER; note = 2'-O-methyl nucleotide
  modified_base 20: mod_base = OTHER; note = 2'-O-methyl nucleotide
  modified_base 49: mod_base = OTHER; note = 2'-fluoro modification
  modified_base 50: mod_base = OTHER; note = 2'-O-methyl nucleotide
  modified_base 51: mod_base = OTHER; note = 2'-fluoro modification
  modified_base 52: mod_base = OTHER; note = 2'-O-methyl nucleotide
  modified_base 53: mod_base = OTHER; note = 2'-fluoro modification
  modified_base 54: mod_base = OTHER; note = 2'-O-methyl nucleotide
  modified_base 55: mod_base = OTHER; note = 2'-fluoro modification
  modified_base 56: mod_base = OTHER; note = 2'-O-methyl nucleotide
  modified_base 57: mod_base = OTHER; note = 2'-fluoro modification
  modified_base 58: mod_base = OTHER; note = 2'-O-methyl nucleotide
  modified_base 59: mod_base = OTHER; note = 2'-fluoro modification
  modified_base 60: mod_base = OTHER; note = 2'-O-methyl nucleotide
  modified_base 61: mod_base = OTHER; note = 2'-fluoro modification
  modified_base 62: mod_base = OTHER; note = 2'-O-methyl nucleotide
  modified_base 63: mod_base = OTHER; note = 2'-fluoro modification
  modified_base 64: mod_base = OTHER; note = 2'-O-methyl nucleotide
  modified_base 65: mod_base = OTHER; note = 2'-fluoro modification
  modified_base 66: mod_base = OTHER; note = 2'-O-methyl nucleotide
  modified_base 67: mod_base = OTHER; note = 2'-fluoro modification
  modified_base 68: mod_base = OTHER; note = 2'-O-methyl nucleotide
  modified_base 69: mod_base = OTHER; note = 2'-fluoro modification
  modified_base 70: mod_base = OTHER; note = 2'-O-methyl nucleotide
  modified_base 71: mod_base = OTHER; note = 2'-fluoro modification
  modified_base 72: mod_base = OTHER; note = 2'-O-methyl nucleotide
  modified_base 73: mod_base = OTHER; note = 2'-fluoro modification
  modified_base 74: mod_base = OTHER; note = 2'-O-methyl nucleotide
  modified_base 75: mod_base = OTHER; note = 2'-fluoro modification
  modified_base 76: mod_base = OTHER; note = 2'-O-methyl nucleotide
  modified_base 77: mod_base = OTHER; note = 2'-fluoro modification, phosphorothioate linkage
  modified_base 78: mod_base = OTHER; note = 2'-O-methyl nucleotide, phosphorothioate linkage
  modified_base 79: mod_base = OTHER; note = 2'-fluoro modification, phosphorothioate linkage
  modified_base 80: mod_base = OTHER; note = 2'-O-methyl nucleotide
  source 1..80: mol_type = other RNA

SEQ ID NO: 448-449 - skipped (2 entries)

SEQ ID NO: 450 - RNA, 68 nt, synthetic construct; identical to SEQ ID NO: 202
  misc_feature 1..68: note = Synthetic
  modified_base 9: mod_base = OTHER; note = 2'-O-methyl nucleotide
  modified_base 10: mod_base = OTHER; note = 2'-O-methyl nucleotide
  modified_base 11: mod_base = OTHER; note = 2'-O-methyl nucleotide
  modified_base 12: mod_base = OTHER; note = 2'-O-methyl nucleotide
  modified_base 13: mod_base = OTHER; note = 2'-O-methyl nucleotide
  modified_base 14: mod_base = OTHER; note = 2'-O-methyl nucleotide
  modified_base 15: mod_base = OTHER; note = 2'-O-methyl nucleotide
  modified_base 16: mod_base = OTHER; note = 2'-O-methyl nucleotide
  modified_base 17: mod_base = OTHER; note = 2'-O-methyl nucleotide
  modified_base 18: mod_base = OTHER; note = 2'-O-methyl nucleotide
  modified_base 19: mod_base = OTHER; note = 2'-O-methyl nucleotide
  modified_base 20: mod_base = OTHER; note = 2'-O-methyl nucleotide
  modified_base 65: mod_base = OTHER; note = phosphorothioate linkage
  modified_base 66: mod_base = OTHER; note = 2'-O-methyl nucleotide, phosphorothioate linkage
  modified_base 67: mod_base = OTHER; note = 2'-O-methyl nucleotide, phosphorothioate linkage
  modified_base 68: mod_base = OTHER; note = 2'-O-methyl nucleotide
  source 1..68: mol_type = other RNA

SEQ ID NO: 451-500 - skipped (50 entries)

SEQ ID NO: 501 - DNA, 4411 bp, synthetic construct
  misc_feature 1..4411: note = Synthetic
  source 1..4411: mol_type = other DNA
gggtcccgcagtcggcgtccagcggctctgcttgttcgtgtgtgtgtcgttgcaggccttattcggatccgccaccatggacaagaagtacagcatcggactggacatcggaacaaacagcgtcggatgggcagtcatcacagacgaatacaaggtcccgagcaagaagttcaaggtcctgggaaacacagacagacacagcatcaagaagaacctgatcggagcactgctgttcgacagcggagaaacagcagaagcaacaagactgaagagaacagcaagaagaagatacacaagaagaaagaacagaatctgctacctgcaggaaatcttcagcaacgaaatggcaaaggtcgacgacagcttcttccacagactggaagaaagcttcctggtcgaagaagacaagaagcacgaaagacacccgatcttcggaaacatcgtcgacgaagtcgcataccacgaaaagtacccgacaatctaccacctgagaaagaagctggtcgacagcacagacaaggcagacctgagactgatctacctggcactggcacacatgatcaagttcagaggacacttcctgatcgaaggagacctgaacccggacaacagcgacgtcgacaagctgttcatccagctggtccagacatacaaccagctgttcgaagaaaacccgatcaacgcaagcggagtcgacgcaaaggcaatcctgagcgcaagactgagcaagagcagaagactggaaaacctgatcgcacagctgccgggagaaaagaagaacggactgttcggaaacctgatcgcactgagcctgggactgacaccgaacttcaagagcaacttcgacctggcagaagacgcaaagctgcagctgagcaaggacacatacgacgacgacctggacaacctgctggcacagatcggagaccagtacgcagacctgttcctggcagcaaagaacctgagcgacgcaatcctgctgagcgacatcctgagagtcaacacagaaatcacaaaggcaccgctgagcgcaagcatgatcaagagatacgacgaacaccaccaggacctgacactgctgaaggcactggtcagacagcagctgccggaaaagtacaaggaaatcttcttcgaccagagcaagaacggatacgcaggatacatcgacggaggagcaagccaggaagaattctacaagttcatcaagccgatcctggaaaagatggacggaacagaagaactgctggtcaagctgaacagagaagacctgctgagaaagcagagaacattcgacaacggaagcatcccgcaccagatccacctgggagaactgcacgcaatcctgagaagacaggaagacttctacccgttcctgaaggacaacagagaaaagatcgaaaagatcctgacattcagaatcccgtactacgtcggaccgctggcaagaggaaacagcagattcgcatggatgacaagaaagagcgaagaaacaatcacaccgtggaacttcgaagaagtcgtcgacaagggagcaagcgcacagagcttcatcgaaagaatgacaaacttcgacaagaacctgccgaacgaaaaggtcctgccgaagcacagcctgctgtacgaatacttcacagtctacaacgaactgacaaaggtcaagtacgtcacagaaggaatgagaaagccggcattcctgagcggagaacagaagaaggcaatcgtcgacctgctgttcaagacaaacagaaaggtcacagtcaagcagctgaaggaagactacttcaagaagatcgaatgcttcgacagcgtcgaaatcagcggagtcgaagacagattcaacgcaagcctgggaacataccacgacctgctgaagatcatcaaggacaaggacttcctggacaacgaagaaaacgaagacatcctggaagacatcgtcctgacactgacactgttcgaagacagagaaatgatcgaagaaagactgaagacatacgcacacctgttcgacgacaaggtcatgaagcagctgaagagaagaagatacacaggatggggaagactgagcagaaagctgatcaacggaatcagagacaagcagagcggaaagacaatcctggacttcctgaagagcgacggattcgcaaacagaaacttcatgcagctgatccacgacgacagcctgacattcaaggaagacatccagaaggcacaggtcagcggacagggagacagcctgcacgaacacatcgcaaacctggcaggaagcccggcaatcaagaagggaatcctgcagacagtcaaggtcgtcgacgaactggtcaaggtcatgggaagacacaagccggaaaacatcgtcatcgaaatggcaagagaaaaccagacaacacagaagggacagaagaacagcagagaaagaatgaagagaatcgaagaaggaatcaaggaactgggaagccagatcctgaaggaacacccggtcgaaaacacacagctgcagaacgaaaagctgtacctgtactacctgcagaacggaagagacatgtacgtcgaccaggaactggacatcaacagactgagcgactacgacgtcgaccacatcgtcccgcagagcttcctgaaggacgacagcatcgacaacaaggtcctgacaagaagcgacaagaacagaggaaagagcgacaacgtcccgagcgaagaagtcgtcaagaagatgaagaactactggagacagctgctgaacgcaaagctgatcacacagagaaagttcgacaacctgacaaaggcagagagaggaggactgagcgaactggacaaggcaggattcatcaagagacagctggtcgaaacaagacagatcacaaagcacgtcgcacagatcctggacagcagaatgaacacaaagtacgacgaaaacgacaagctgatcagagaagtcaaggtcatcacactgaagagcaagctggtcagcgacttcagaaaggacttccagttctacaaggtcagagaaatcaacaactaccaccacgcacacgacgcatacctgaacgcagtcgtcggaacagcactgatcaagaagtacccgaagctggaaagcgaattcgtctacggagactacaaggtctacgacgtcagaaagatgatcgcaaagagcgaacaggaaatcggaaaggcaacagcaaagtacttcttctacagcaacatcatgaacttcttcaagacagaaatcacactggcaaacggagaaatcagaaagagaccgctgatcgaaacaaacggagaaacaggagaaatcgtctgggacaagggaagagacttcgcaacagtcagaaaggtcctgagcatgccgcaggtcaacatcgtcaagaagacagaagtccagacaggaggattcagcaaggaaagcatcctgccgaagagaaacagcgacaagctgatcgcaagaaagaaggactgggacccgaagaagtacggaggattcgacagcccgacagtcgcatacagcgtcctggtcgtcgcaaaggtcgaaaagggaaagagcaagaagctgaagagcgtcaaggaactgctgggaatcacaatcatggaaagaagcagcttcgaaaagaacccgatcgacttcctggaagcaaagggatacaaggaagtcaagaaggacctgatcatcaagctgccgaagtacagcctgttcgaactggaaaacggaagaaagagaatgctggcaagcgcaggagaactgcagaagggaaacgaactggcactgccgagcaagtacgtcaacttcctgtacctggcaagccactacgaaaagctgaagggaagcccggaagacaacgaacagaagcagctgttcgtcgaacagcacaagcactacctggacgaaatcatcgaacagatcagcgaattcagcaagagagtcatcctggcagacgcaaacctggacaaggtcctgagcgcatacaacaagcacagagacaagccgatcagagaacaggcagaaaacatcatccacctgttcacactgacaaacctgggagcaccggcagcattcaagtacttcgacacaacaatcgacagaaagagatacacaagcacaaaggaagtcctggacgcaacactgatccaccagagcatcacaggactgtacgaaacaagaatcgacctgagccagctgggaggagacggaggaggaagcccgaagaagaagagaaaggtctagctagccatcacatttaaaagcatctcagcctaccatgagaataagagaaagaaaatgaagatcaatagcttattcatctctttttctttttcgttggtgtaaagccaacaccctgtctaaaaaacataaatttctttaatcattttgcctcttttctctgtgcttcaattaataaaaaatggaaagaacctcgag

SEQ ID NO: 502 - RNA, 4107 nt, synthetic construct
  misc_feature 1..4107: note = Synthetic
  source 1..4107: mol_type = other RNA
atggacaagaagtacagcatcggactggacatcggaacaaacagcgtcggatgggcagtcatcacagacgaatacaaggtcccgagcaagaagttcaaggtcctgggaaacacagacagacacagcatcaagaagaacctgatcggagcactgctgttcgacagcggagaaacagcagaagcaacaagactgaagagaacagcaagaagaagatacacaagaagaaagaacagaatctgctacctgcaggaaatcttcagcaacgaaatggcaaaggtcgacgacagcttcttccacagactggaagaaagcttcctggtcgaagaagacaagaagcacgaaagacacccgatcttcggaaacatcgtcgacgaagtcgcataccacgaaaagtacccgacaatctaccacctgagaaagaagctggtcgacagcacagacaaggcagacctgagactgatctacctggcactggcacacatgatcaagttcagaggacacttcctgatcgaaggagacctgaacccggacaacagcgacgtcgacaagctgttcatccagctggtccagacatacaaccagctgttcgaagaaaacccgatcaacgcaagcggagtcgacgcaaaggcaatcctgagcgcaagactgagcaagagcagaagactggaaaacctgatcgcacagctgccgggagaaaagaagaacggactgttcggaaacctgatcgcactgagcctgggactgacaccgaacttcaagagcaacttcgacctggcagaagacgcaaagctgcagctgagcaaggacacatacgacgacgacctggacaacctgctggcacagatcggagaccagtacgcagacctgttcctggcagcaaagaacctgagcgacgcaatcctgctgagcgacatcctgagagtcaacacagaaatcacaaaggcaccgctgagcgcaagcatgatcaagagatacgacgaacaccaccaggacctgacactgctgaaggcactggtcagacagcagctgccggaaaagtacaaggaaatcttcttcgaccagagcaagaacggatacgcaggatacatcgacggaggagcaagccaggaagaattctacaagttcatcaagccgatcctggaaaagatggacggaacagaagaactgctggtcaagctgaacagagaagacctgctgagaaagcagagaacattcgacaacggaagcatcccgcaccagatccacctgggagaactgcacgcaatcctgagaagacaggaagacttctacccgttcctgaaggacaacagagaaaagatcgaaaagatcctgacattcagaatcccgtactacgtcggaccgctggcaagaggaaacagcagattcgcatggatgacaagaaagagcgaagaaacaatcacaccgtggaacttcgaagaagtcgtcgacaagggagcaagcgcacagagcttcatcgaaagaatgacaaacttcgacaagaacctgccgaacgaaaaggtcctgccgaagcacagcctgctgtacgaatacttcacagtctacaacgaactgacaaaggtcaagtacgtcacagaaggaatgagaaagccggcattcctgagcggagaacagaagaaggcaatcgtcgacctgctgttcaagacaaacagaaaggtcacagtcaagcagctgaaggaagactacttcaagaagatcgaatgcttcgacagcgtcgaaatcagcggagtcgaagacagattcaacgcaagcctgggaacataccacgacctgctgaagatcatcaaggacaaggacttcctggacaacgaagaaaacgaagacatcctggaagacatcgtcctgacactgacactgttcgaagacagagaaatgatcgaagaaagactgaagacatacgcacacctgttcgacgacaaggtcatgaagcagctgaagagaagaagatacacaggatggggaagactgagcagaaagctgatcaacggaatcagagacaagcagagcggaaagacaatcctggacttcctgaagagcgacggattcgcaaacagaaacttcatgcagctgatccacgacgacagcctgacattcaaggaagacatccagaaggcacaggtcagcggacagggagacagcctgcacgaacacatcgcaaacctggcaggaagcccggcaatcaagaagggaatcctgcagacagtcaaggtcgtcgacgaactggtcaaggtcatgggaagacacaagccggaaaacatcgtcatcgaaatggcaagagaaaaccagacaacacagaagggacagaagaacagcagagaaagaatgaagagaatcgaagaaggaatcaaggaactgggaagccagatcctgaaggaacacccggtcgaaaacacacagctgcagaacgaaaagctgtacctgtactacctgcagaacggaagagacatgtacgtcgaccaggaactggacatcaacagactgagcgactacgacgtcgaccacatcgtcccgcagagcttcctgaaggacgacagcatcgacaacaaggtcctgacaagaagcgacaagaacagaggaaagagcgacaacgtcccgagcgaagaagtcgtcaagaagatgaagaactactggagacagctgctgaacgcaaagctgatcacacagagaaagttcgacaacctgacaaaggcagagagaggaggactgagcgaactggacaaggcaggattcatcaagagacagctggtcgaaacaagacagatcacaaagcacgtcgcacagatcctggacagcagaatgaacacaaagtacgacgaaaacgacaagctgatcagagaagtcaaggtcatcacactgaagagcaagctggtcagcgacttcagaaaggacttccagttctacaaggtcagagaaatcaacaactaccaccacgcacacgacgcatacctgaacgcagtcgtcggaacagcactgatcaagaagtacccgaagctggaaagcgaattcgtctacggagactacaaggtctacgacgtcagaaagatgatcgcaaagagcgaacaggaaatcggaaaggcaacagcaaagtacttcttctacagcaacatcatgaacttcttcaagacagaaatcacactggcaaacggagaaatcagaaagagaccgctgatcgaaacaaacggagaaacaggagaaatcgtctgggacaagggaagagacttcgcaacagtcagaaaggtcctgagcatgccgcaggtcaacatcgtcaagaagacagaagtccagacaggaggattcagcaaggaaagcatcctgccgaagagaaacagcgacaagctgatcgcaagaaagaaggactgggacccgaagaagtacggaggattcgacagcccgacagtcgcatacagcgtcctggtcgtcgcaaaggtcgaaaagggaaagagcaagaagctgaagagcgtcaaggaactgctgggaatcacaatcatggaaagaagcagcttcgaaaagaacccgatcgacttcctggaagcaaagggatacaaggaagtcaagaaggacctgatcatcaagctgccgaagtacagcctgttcgaactggaaaacggaagaaagagaatgctggcaagcgcaggagaactgcagaagggaaacgaactggcactgccgagcaagtacgtcaacttcctgtacctggcaagccactacgaaaagctgaagggaagcccggaagacaacgaacagaagcagctgttcgtcgaacagcacaagcactacctggacgaaatcatcgaacagatcagcgaattcagcaagagagtcatcctggcagacgcaaacctggacaaggtcctgagcgcatacaacaagcacagagacaagccgatcagagaacaggcagaaaacatcatccacctgttcacactgacaaacctgggagcaccggcagcattcaagtacttcgacacaacaatcgacagaaagagatacacaagcacaaaggaagtcctggacgcaacactgatccaccagagcatcacaggactgtacgaaacaagaatcgacctgagccagctgggaggagactag

SEQ ID NO: 503 - RNA, 4101 nt, synthetic construct
  misc_feature 1..4101: note = Synthetic
  source 1..4101: mol_type = other RNA
gacaagaagtacagcatcggactggacatcggaacaaacagcgtcggatgggcagtcatcacagacgaatacaaggtcccgagcaagaagttcaaggtcctgggaaacacagacagacacagcatcaagaagaacctgatcggagcactgctgttcgacagcggagaaacagcagaagcaacaagactgaagagaacagcaagaagaagatacacaagaagaaagaacagaatctgctacctgcaggaaatcttcagcaacgaaatggcaaaggtcgacgacagcttcttccacagactggaagaaagcttcctggtcgaagaagacaagaagcacgaaagacacccgatcttcggaaacatcgtcgacgaagtcgcataccacgaaaagtacccgacaatctaccacctgagaaagaagctggtcgacagcacagacaaggcagacctgagactgatctacctggcactggcacacatgatcaagttcagaggacacttcctgatcgaaggagacctgaacccggacaacagcgacgtcgacaagctgttcatccagctggtccagacatacaaccagctgttcgaagaaaacccgatcaacgcaagcggagtcgacgcaaaggcaatcctgagcgcaagactgagcaagagcagaagactggaaaacctgatcgcacagctgccgggagaaaagaagaacggactgttcggaaacctgatcgcactgagcctgggactgacaccgaacttcaagagcaacttcgacctggcagaagacgcaaagctgcagctgagcaaggacacatacgacgacgacctggacaacctgctggcacagatcggagaccagtacgcagacctgttcctggcagcaaagaacctgagcgacgcaatcctgctgagcgacatcctgagagtcaacacagaaatcacaaaggcaccgctgagcgcaagcatgatcaagagatacgacgaacaccaccaggacctgacactgctgaaggcactggtcagacagcagctgccggaaaagtacaaggaaatcttcttcgaccagagcaagaacggatacgcaggatacatcgacggaggagcaagccaggaagaattctacaagttcatcaagccgatcctggaaaagatggacggaacagaagaactgctggtcaagctgaacagagaagacctgctgagaaagcagagaacattcgacaacggaagcatcccgcaccagatccacctgggagaactgcacgcaatcctgagaagacaggaagacttctacccgttcctgaaggacaacagagaaaagatcgaaaagatcctgacattcagaatcccgtactacgtcggaccgctggcaagaggaaacagcagattcgcatggatgacaagaaagagcgaagaaacaatcacaccgtggaacttcgaagaagtcgtcgacaagggagcaagcgcacagagcttcatcgaaagaatgacaaacttcgacaagaacctgccgaacgaaaaggtcctgccgaagcacagcctgctgtacgaatacttcacagtctacaacgaactgacaaaggtcaagtacgtcacagaaggaatgagaaagccggcattcctgagcggagaacagaagaaggcaatcgtcgacctgctgttcaagacaaacagaaaggtcacagtcaagcagctgaaggaagactacttcaagaagatcgaatgcttcgacagcgtcgaaatcagcggagtcgaagacagattcaacgcaagcctgggaacataccacgacctgctgaagatcatcaaggacaaggacttcctggacaacgaagaaaacgaagacatcctggaagacatcgtcctgacactgacactgttcgaagacagagaaatgatcgaagaaagactgaagacatacgcacacctgttcgacgacaaggtcatgaagcagctgaagagaagaagatacacaggatggggaagactgagcagaaagctgatcaacggaatcagagacaagcagagcggaaagacaatcctggacttcctgaagagcgacggattcgcaaacagaaacttcatgcagctgatccacgacgacagcctgacattcaaggaagacatccagaaggcacaggtcagcggacagggagacagcctgcacgaacacatcgcaaacctggcaggaagcccggcaatcaagaagggaatcctgcagacagtcaaggtcgtcgacgaactggtcaaggtcatgggaagacacaagccggaaaacatcgtcatcgaaatggcaagagaaaaccagacaacacagaagggacagaagaacagcagagaaagaatgaagagaatcgaagaaggaatcaaggaactgggaagccagatcctgaaggaacacccggtcgaaaacacacagctgcagaacgaaaagctgtacctgtactacctgcagaacggaagagacatgtacgtcgaccaggaactggacatcaacagactgagcgactacgacgtcgaccacatcgtcccgcagagcttcctgaaggacgacagcatcgacaacaaggtcctgacaagaagcgacaagaacagaggaaagagcgacaacgtcccgagcgaagaagtcgtcaagaagatgaagaactactggagacagctgctgaacgcaaagctgatcacacagagaaagttcgacaacctgacaaaggcagagagaggaggactgagcgaactggacaaggcaggattcatcaagagacagctggtcgaaacaagacagatcacaaagcacgtcgcacagatcctggacagcagaatgaacacaaagtacgacgaaaacgacaagctgatcagagaagtcaaggtcatcacactgaagagcaagctggtcagcgacttcagaaaggacttccagttctacaaggtcagagaaatcaacaactaccaccacgcacacgacgcatacctgaacgcagtcgtcggaacagcactgatcaagaagtacccgaagctggaaagcgaattcgtctacggagactacaaggtctacgacgtcagaaagatgatcgcaaagagcgaacaggaaatcggaaaggcaacagcaaagtacttcttctacagcaacatcatgaacttcttcaagacagaaatcacactggcaaacggagaaatcagaaagagaccgctgatcgaaacaaacggagaaacaggagaaatcgtctgggacaagggaagagacttcgcaacagtcagaaaggtcctgagcatgccgcaggtcaacatcgtcaagaagacagaagtccagacaggaggattcagcaaggaaagcatcctgccgaagagaaacagcgacaagctgatcgcaagaaagaaggactgggacccgaagaagtacggaggattcgacagcccgacagtcgcatacagcgtcctggtcgtcgcaaaggtcgaaaagggaaagagcaagaagctgaagagcgtcaaggaactgctgggaatcacaatcatggaaagaagcagcttcgaaaagaacccgatcgacttcctggaagcaaagggatacaaggaagtcaagaaggacctgatcatcaagctgccgaagtacagcctgttcgaactggaaaacggaagaaagagaatgctggcaagcgcaggagaactgcagaagggaaacgaactggcactgccgagcaagtacgtcaacttcctgtacctggcaagccactacgaaaagctgaagggaagcccggaagacaacgaacagaagcagctgttcgtcgaacagcacaagcactacctggacgaaatcatcgaacagatcagcgaattcagcaagagagtcatcctggcagacgcaaacctggacaaggtcctgagcgcatacaacaagcacagagacaagccgatcagagaacaggcagaaaacatcatccacctgttcacactgacaaacctgggagcaccggcagcattcaagtacttcgacacaacaatcgacagaaagagatacacaagcacaaaggaagtcctggacgcaacactgatccaccagagcatcacaggactgtacgaaacaagaatcgacctgagccagctgggaggagac

SEQ ID NO: 504 - RNA, 4179 nt, synthetic construct
  misc_feature 1..4179: note = Synthetic
  source 1..4179: mol_type = other RNA
atggacaagaagtacagcatcggactggacatcggaacaaacagcgtcggatgggcagtcatcacagacgaatacaaggtcccgagcaagaagttcaaggtcctgggaaacacagacagacacagcatcaagaagaacctgatcggagcactgctgttcgacagcggagaaacagcagaagcaacaagactgaagagaacagcaagaagaagatacacaagaagaaagaacagaatctgctacctgcaggaaatcttcagcaacgaaatggcaaaggtcgacgacagcttcttccacagactggaagaaagcttcctggtcgaagaagacaagaagcacgaaagacacccgatcttcggaaacatcgtcgacgaagtcgcataccacgaaaagtacccgacaatctaccacctgagaaagaagctggtcgacagcacagacaaggcagacctgagactgatctacctggcactggcacacatgatcaagttcagaggacacttcctgatcgaaggagacctgaacccggacaacagcgacgtcgacaagctgttcatccagctggtccagacatacaaccagctgttcgaagaaaacccgatcaacgcaagcggagtcgacgcaaaggcaatcctgagcgcaagactgagcaagagcagaagactggaaaacctgatcgcacagctgccgggagaaaagaagaacggactgttcggaaacctgatcgcactgagcctgggactgacaccgaacttcaagagcaacttcgacctggcagaagacgcaaagctgcagctgagcaaggacacatacgacgacgacctggacaacctgctggcacagatcggagaccagtacgcagacctgttcctggcagcaaagaacctgagcgacgcaatcctgctgagcgacatcctgagagtcaacacagaaatcacaaaggcaccgctgagcgcaagcatgatcaagagatacgacgaacaccaccaggacctgacactgctgaaggcactggtcagacagcagctgccggaaaagtacaaggaaatcttcttcgaccagagcaagaacggatacgcaggatacatcgacggaggagcaagccaggaagaattctacaagttcatcaagccgatcctggaaaagatggacggaacagaagaactgctggtcaagctgaacagagaagacctgctgagaaagcagagaacattcgacaacggaagcatcccgcaccagatccacctgggagaactgcacgcaatcctgagaagacaggaagacttctacccgttcctgaaggacaacagagaaaagatcgaaaagatcctgacattcagaatcccgtactacgtcggaccgctggcaagaggaaacagcagattcgcatggatgacaagaaagagcgaagaaacaatcacaccgtggaacttcgaagaagtcgtcgacaagggagcaagcgcacagagcttcatcgaaagaatgacaaacttcgacaagaacctgccgaacgaaaaggtcctgccgaagcacagcctgctgtacgaatacttcacagtctacaacgaactgacaaaggtcaagtacgtcacagaaggaatgagaaagccggcattcctgagcggagaacagaagaaggcaatcgtcgacctgctgttcaagacaaacagaaaggtcacagtcaagcagctgaaggaagactacttcaagaagatcgaatgcttcgacagcgtcgaaatcagcggagtcgaagacagattcaacgcaagcctgggaacataccacgacctgctgaagatcatcaaggacaaggacttcctggacaacgaagaaaacgaagacatcctggaagacatcgtcctgacactgacactgttcgaagacagagaaatgatcgaagaaagactgaagacatacgcacacctgttcgacgacaaggtcatgaagcagctgaagagaagaagatacacaggatggggaagactgagcagaaagctgatcaacggaatcagagacaagcagagcggaaagacaatcctggacttcctgaagagcgacggattcgcaaacagaaacttcatgcagctgatccacgacgacagcctgacattcaaggaagacatccagaaggcacaggtcagcggacagggagacagcctgcacgaacacatcgcaaacctggcaggaagcccggcaatcaagaagggaatcctgcagacagtcaaggtcgtcgacgaactggtcaaggtcatgggaagacacaagccggaaaacatcgtcatcgaaatggcaagagaaaaccagacaacacagaagggacagaagaacagcagagaaagaatgaagagaatcgaagaaggaatcaaggaactgggaagccagatcctgaaggaacacccggtcgaaaacacacagctgcagaacgaaaagctgtacctgtactacctgcagaacggaagagacatgtacgtcgaccaggaactggacatcaacagactgagcgactacgacgtcgaccacatcgtcccgcagagcttcctgaaggacgacagcatcgacaacaaggtcctgacaagaagcgacaagaacagaggaaagagcgacaacgtcccgagcgaagaagtcgtcaagaagatgaagaactactggagacagctgctgaacgcaaagctgatcacacagagaaagttcgacaacctgacaaaggcagagagaggaggactgagcgaactggacaaggcaggattcatcaagagacagctggtcgaaacaagacagatcacaaagcacgtcgcacagatcctggacagcagaatgaacacaaagtacgacgaaaacgacaagctgatcagagaagtcaaggtcatcacactgaagagcaagctggtcagcgacttcagaaaggacttccagttctacaaggtcagagaaatcaacaactaccaccacgcacacgacgcatacctgaacgcagtcgtcggaacagcactgatcaagaagtacccgaagctggaaagcgaattcgtctacggagactacaaggtctacgacgtcagaaagatgatcgcaaagagcgaacaggaaatcggaaaggcaacagcaaagtacttcttctacagcaacatcatgaacttcttcaagacagaaatcacactggcaaacggagaaatcagaaagagaccgctgatcgaaacaaacggagaaacaggagaaatcgtctgggacaagggaagagacttcgcaacagtcagaaaggtcctgagcatgccgcaggtcaacatcgtcaagaagacagaagtccagacaggaggattcagcaaggaaagcatcctgccgaagagaaacagcgacaagctgatcgcaagaaagaaggactgggacccgaagaagtacggaggattcgacagcccgacagtcgcatacagcgtcctggtcgtcgcaaaggtcgaaaagggaaagagcaagaagctgaagagcgtcaaggaactgctgggaatcacaatcatggaaagaagcagcttcgaaaagaacccgatcgacttcctggaagcaaagggatacaaggaagtcaagaaggacctgatcatcaagctgccgaagtacagcctgttcgaactggaaaacggaagaaagagaatgctggcaagcgcaggagaactgcagaagggaaacgaactggcactgccgagcaagtacgtcaacttcctgtacctggcaagccactacgaaaagctgaagggaagcccggaagacaacgaacagaagcagctgttcgtcgaacagcacaagcactacctggacgaaatcatcgaacagatcagcgaattcagcaagagagtcatcctggcagacgcaaacctggacaaggtcctgagcgcatacaacaagcacagagacaagccgatcagagaacaggcagaaaacatcatccacctgttcacactgacaaacctgggagcaccggcagcattcaagtacttcgacacaacaatcgacagaaagagatacacaagcacaaaggaagtcctggacgcaacactgatccaccagagcatcacaggactgtacgaaacaagaatcgacctgagccagctgggaggagacggaagcggaagcccgaagaagaagagaaaggtcgacggaagcccgaagaagaagagaaaggtcgacagcggatag

SEQ ID NO: 505 - RNA, 4173 nt, synthetic construct
  misc_feature 1..4173: note = Synthetic
  source 1..4173: mol_type = other RNA
gacaagaagtacagcatcggactggacatcggaacaaacagcgtcggatgggcagtcatcacagacgaatacaaggtcccgagcaagaagttcaaggtcctgggaaacacagacagacacagcatcaagaagaacctgatcggagcactgctgttcgacagcggagaaacagcagaagcaacaagactgaagagaacagcaagaagaagatacacaagaagaaagaacagaatctgctacctgcaggaaatcttcagcaacgaaatggcaaaggtcgacgacagcttcttccacagactggaagaaagcttcctggtcgaagaagacaagaagcacgaaagacacccgatcttcggaaacatcgtcgacgaagtcgcataccacgaaaagtacccgacaatctaccacctgagaaagaagctggtcgacagcacagacaaggcagacctgagactgatctacctggcactggcacacatgatcaagttcagaggacacttcctgatcgaaggagacctgaacccggacaacagcgacgtcgacaagctgttcatccagctggtccagacatacaaccagctgttcgaagaaaacccgatcaacgcaagcggagtcgacgcaaaggcaatcctgagcgcaagactgagcaagagcagaagactggaaaacctgatcgcacagctgccgggagaaaagaagaacggactgttcggaaacctgatcgcactgagcctgggactgacaccgaacttcaagagcaacttcgacctggcagaagacgcaaagctgcagctgagcaaggacacatacgacgacgacctggacaacctgctggcacagatcggagaccagtacgcagacctgttcctggcagcaaagaacctgagcgacgcaatcctgctgagcgacatcctgagagtcaacacagaaatcacaaaggcaccgctgagcgcaagcatgatcaagagatacgacgaacaccaccaggacctgacactgctgaaggcactggtcagacagcagctgccggaaaagtacaaggaaatcttcttcgaccagagcaagaacggatacgcaggatacatcgacggaggagcaagccaggaagaattctacaagttcatcaagccgatcctggaaaagatggacggaacagaagaactgctggtcaagctgaacagagaagacctgctgagaaagcagagaacattcgacaacggaagcatcccgcaccagatccacctgggagaactgcacgcaatcctgagaagacaggaagacttctacccgttcctgaaggacaacagagaaaagatcgaaaagatcctgacattcagaatcccgtactacgtcggaccgctggcaagaggaaacagcagattcgcatggatgacaagaaagagcgaagaaacaatcacaccgtggaacttcgaagaagtcgtcgacaagggagcaagcgcacagagcttcatcgaaagaatgacaaacttcgacaagaacctgccgaacgaaaaggtcctgccgaagcacagcctgctgtacgaatacttcacagtctacaacgaactgacaaaggtcaagtacgtcacagaaggaatgagaaagccggcattcctgagcggagaacagaagaaggcaatcgtcgacctgctgttcaagacaaacagaaaggtcacagtcaagcagctgaaggaagactacttcaagaagatcgaatgcttcgacagcgtcgaaatcagcggagtcgaagacagattcaacgcaagcctgggaacataccacgacctgctgaagatcatcaaggacaaggacttcctggacaacgaagaaaacgaagacatcctggaagacatcgtcctgacactgacactgttcgaagacagagaaatgatcgaagaaagactgaagacatacgcacacctgttcgacgacaaggtcatgaagcagctgaagagaagaagatacacaggatggggaagactgagcagaaagctgatcaacggaatcagagacaagcagagcggaaagacaatcctggacttcctgaagagcgacggattcgcaaacagaaacttcatgcagctgatccacgacgacagcctgacattcaaggaagacatccagaaggcacaggtcagcggacagggagacagcctgcacgaacacatcgcaaacctggcaggaagcccggcaatcaagaagggaatcctgcagacagtcaaggtcgtcgacgaactggtcaaggtcatgggaagacacaagccggaaaacatcgtcatcgaaatggcaagagaaaaccagacaacacagaagggacagaagaacagcagagaaagaatgaagagaatcgaagaaggaatcaaggaactgggaagccagatcctgaaggaacacccggtcgaaaacacacagctgcagaacgaaaagctgtacctgtactacctgcagaacggaagagacatgtacgtcgaccaggaactggacatcaacagactgagcgactacgacgtcgaccacatcgtcccgcagagcttcctgaaggacgacagcatcgacaacaaggtcctgacaagaagcgacaagaacagaggaaagagcgacaacgtcccgagcgaagaagtcgtcaagaagatgaagaactactggagacagctgctgaacgcaaagctgatcacacagagaaagttcgacaacctgacaaaggcagagagaggaggactgagcgaactggacaaggcaggattcatcaagagacagctggtcgaaacaagacagatcacaaagcacgtcgcacagatcctggacagcagaatgaacacaaagtacgacgaaaacgacaagctgatcagagaagtcaaggtcatcacactgaagagcaagctggtcagcgacttcagaaaggacttccagttctacaaggtcagagaaatcaacaactaccaccacgcacacgacgcatacctgaacgcagtcgtcggaacagcactgatcaagaagtacccgaagctggaaagcgaattcgtctacggagactacaaggtctacgacgtcagaaagatgatcgcaaagagcgaacaggaaatcggaaaggcaacagcaaagtacttcttctacagcaacatcatgaacttcttcaagacagaaatcacactggcaaacggagaaatcagaaagagaccgctgatcgaaacaaacggagaaacaggagaaatcgtctgggacaagggaagagacttcgcaacagtcagaaaggtcctgagcatgccgcaggtcaacatcgtcaagaagacagaagtccagacaggaggattcagcaaggaaagcatcctgccgaagagaaacagcgacaagctgatcgcaagaaagaaggactgggacccgaagaagtacggaggattcgacagcccgacagtcgcatacagcgtcctggtcgtcgcaaaggtcgaaaagggaaagagcaagaagctgaagagcgtcaaggaactgctgggaatcacaatcatggaaagaagcagcttcgaaaagaacccgatcgacttcctggaagcaaagggatacaaggaagtcaagaaggacctgatcatcaagctgccgaagtacagcctgttcgaactggaaaacggaagaaagagaatgctggcaagcgcaggagaactgcagaagggaaacgaactggcactgccgagcaagtacgtcaacttcctgtacctggcaagccactacgaaaagctgaagggaagcccggaagacaacgaacagaagcagctgttcgtcgaacagcacaagcactacctggacgaaatcatcgaacagatcagcgaattcagcaagagagtcatcctggcagacgcaaacctggacaaggtcctgagcgcatacaacaagcacagagacaagccgatcagagaacaggcagaaaacatcatccacctgttcacactgacaaacctgggagcaccggcagcattcaagtacttcgacacaacaatcgacagaaagagatacacaagcacaaaggaagtcctggacgcaacactgatccaccagagcatcacaggactgtacgaaacaagaatcgacctgagccagctgggaggagacggaagcggaagcccgaagaagaagagaaaggtcgacggaagcccgaagaagaagagaaaggtcgacagcgga

SEQ ID NO: 506 - DNA, 4405 bp, synthetic construct
  misc_feature 1..4405: note = Synthetic
  source 1..4405: mol_type = other DNA
gggtcccgcagtcggcgtccagcggctctgcttgttcgtgtgtgtgtcgttgcaggccttattcggatccatggacaagaagtacagcatcggactggacatcggaacaaacagcgtcggatgggcagtcatcacagacgaatacaaggtcccgagcaagaagttcaaggtcctgggaaacacagacagacacagcatcaagaagaacctgatcggagcactgctgttcgacagcggagaaacagcagaagcaacaagactgaagagaacagcaagaagaagatacacaagaagaaagaacagaatctgctacctgcaggaaatcttcagcaacgaaatggcaaaggtcgacgacagcttcttccacagactggaagaaagcttcctggtcgaagaagacaagaagcacgaaagacacccgatcttcggaaacatcgtcgacgaagtcgcataccacgaaaagtacccgacaatctaccacctgagaaagaagctggtcgacagcacagacaaggcagacctgagactgatctacctggcactggcacacatgatcaagttcagaggacacttcctgatcgaaggagacctgaacccggacaacagcgacgtcgacaagctgttcatccagctggtccagacatacaaccagctgttcgaagaaaacccgatcaacgcaagcggagtcgacgcaaaggcaatcctgagcgcaagactgagcaagagcagaagactggaaaacctgatcgcacagctgccgggagaaaagaagaacggactgttcggaaacctgatcgcactgagcctgggactgacaccgaacttcaagagcaacttcgacctggcagaagacgcaaagctgcagctgagcaaggacacatacgacgacgacctggacaacctgctggcacagatcggagaccagtacgcagacctgttcctggcagcaaagaacctgagcgacgcaatcctgctgagcgacatcctgagagtcaacacagaaatcacaaaggcaccgctgagcgcaagcatgatcaagagatacgacgaacaccaccaggacctgacactgctgaaggcactggtcagacagcagctgccggaaaagtacaaggaaatcttcttcgaccagagcaagaacggatacgcaggatacatcgacggaggagcaagccaggaagaattctacaagttcatcaagccgatcctggaaaagatggacggaacagaagaactgctggtcaagctgaacagagaagacctgctgagaaagcagagaacattcgacaacggaagcatcccgcaccagatccacctgggagaactgcacgcaatcctgagaagacaggaagacttctacccgttcctgaaggacaacagagaaaagatcgaaaagatcctgacattcagaatcccgtactacgtcggaccgctggcaagaggaaacagcagattcgcatggatgacaagaaagagcgaagaaacaatcacaccgtggaacttcgaagaagtcgtcgacaagggagcaagcgcacagagcttcatcgaaagaatgacaaacttcgacaagaacctgccgaacgaaaaggtcctgccgaagcacagcctgctgtacgaatacttcacagtctacaacgaactgacaaaggtcaagtacgtcacagaaggaatgagaaagccggcattcctgagcggagaacagaagaaggcaatcgtcgacctgctgttcaagacaaacagaaaggtcacagtcaagcagctgaaggaagactacttcaagaagatcgaatgcttcgacagcgtcgaaatcagcggagtcgaagacagattcaacgcaagcctgggaacataccacgacctgctgaagatcatcaaggacaaggacttcctggacaacgaagaaaacgaagacatcctggaagacatcgtcctgacactgacactgttcgaagacagagaaatgatcgaagaaagactgaagacatacgcacacctgttcgacgacaaggtcatgaagcagctgaagagaagaagatacacaggatggggaagactgagcagaaagctgatcaacggaatcagagacaagcagagcggaaagacaatcctggacttcctgaagagcgacggattcgcaaacagaaacttcatgcagctgatccacgacgacagcctgacattcaaggaagacatccagaaggcacaggtcagcggacagggagacagcctgcacgaacacatcgcaaacctggcaggaagcccggcaatcaagaagggaatcctgcagacagtcaaggtcgtcgacgaactggtcaaggtcatgggaagacacaagccggaaaacatcgtcatcgaaatggcaagagaaaaccagacaacacagaagggacagaagaacagcagagaaagaatgaagagaatcgaagaaggaatcaaggaactgggaagccagatcctgaaggaacacccggtcgaaaacacacagctgcagaacgaaaagctgtacctgtactacctgcagaacggaagagacatgtacgtcgaccaggaactggacatcaacagactgagcgactacgacgtcgaccacatcgtcccgcagagcttcctgaaggacgacagcatcgacaacaaggtcctgacaagaagcgacaagaacagaggaaagagcgacaacgtcccgagcgaagaagtcgtcaagaagatgaagaactactggagacagctgctgaacgcaaagctgatcacacagagaaagttcgacaacctgacaaaggcagagagaggaggactgagcgaactggacaaggcaggattcatcaagagacagctggtcgaaacaagacagatcacaaagcacgtcgcacagatcctggacagcagaatgaacacaaagtacgacgaaaacgacaagctgatcagagaagtcaaggtcatcacactgaagagcaagctggtcagcgacttcagaaaggacttccagttctacaaggtcagagaaatcaacaactaccaccacgcacacgacgcatacctgaacgcagtcgtcggaacagcactgatcaagaagtacccgaagctggaaagcgaattcgtctacggagactacaaggtctacgacgtcagaaagatgatcgcaaagagcgaacaggaaatcggaaaggcaacagcaaagtacttcttctacagcaacatcatgaacttcttcaagacagaaatcacactggcaaacggagaaatcagaaagagaccgctgatcgaaacaaacggagaaacaggagaaatcgtctgggacaagggaagagacttcgcaacagtcagaaaggtcctgagcatgccgcaggtcaacatcgtcaagaagacagaagtccagacaggaggattcagcaaggaaagcatcctgccgaagagaaacagcgacaagctgatcgcaagaaagaaggactgggacccgaagaagtacggaggattcgacagcccgacagtcgcatacagcgtcctggtcgtcgcaaaggtcgaaaagggaaagagcaagaagctgaagagcgtcaaggaactgctgggaatcacaatcatggaaagaagcagcttcgaaaagaacccgatcgacttcctggaagcaaagggatacaaggaagtcaagaaggacctgatcatcaagctgccgaagtacagcctgttcgaactggaaaacggaagaaagagaatgctggcaagcgcaggagaactgcagaagggaaacgaactggcactgccgagcaagtacgtcaacttcctgtacctggcaagccactacgaaaagctgaagggaagcccggaagacaacgaacagaagcagctgttcgtcgaacagcacaagcactacctggacgaaatcatcgaacagatcagcgaattcagcaagagagtcatcctggcagacgcaaacctggacaaggtcctgagcgcatacaacaagcacagagacaagccgatcagagaacaggcagaaaacatcatccacctgttcacactgacaaacctgggagcaccggcagcattcaagtacttcgacacaacaatcgacagaaagagatacacaagcacaaaggaagtcctggacgcaacactgatccaccagagcatcacaggactgtacgaaacaagaatcgacctgagccagctgggaggagacggaggaggaagcccgaagaagaagagaaaggtctagctagccatcacatttaaaagcatctcagcctaccatgagaataagagaaagaaaatgaagatcaatagcttattcatctctttttctttttcgttggtgtaaagccaacaccctgtctaaaaaacataaatttctttaatcattttgcctcttttctctgtgcttcaattaataaaaaatggaaagaacctcgag

SEQ ID NO: 507 - DNA, 4140 bp, synthetic construct
  misc_feature 1..4140: note = Synthetic
  source 1..4140: mol_type = other DNA
atggacaagaagtacagcatcggactggacatcggaacaaacagcgtcggatgggcagtcatcacagacgaatacaaggtcccgagcaagaagttcaaggtcctgggaaacacagacagacacagcatcaagaagaacctgatcggagcactgctgttcgacagcggagaaacagcagaagcaacaagactgaagagaacagcaagaagaagatacacaagaagaaagaacagaatctgctacctgcaggaaatcttcagcaacgaaatggcaaaggtcgacgacagcttcttccaccggctggaagaaagcttcctggtcgaagaagacaagaagcacgaaagacacccgatcttcggaaacatcgtcgacgaagtcgcataccacgaaaagtacccgacaatctaccacctgagaaagaagctggtcgacagcacagacaaggcagacctgagactgatctacctggcactggcacacatgatcaagttcagaggacacttcctgatcgaaggagacctgaacccggacaacagcgacgtcgacaagctgttcatccagctggtccagacatacaaccagctgttcgaagaaaacccgatcaacgcaagcggagtcgacgcaaaggcaatcctgagcgcaagactgagcaagagcagaagactggaaaacctgatcgcacagctgccgggagaaaagaagaacggactgttcggaaacctgatcgcactgagcctgggactgacaccgaacttcaagagcaacttcgacctggcagaagacgcaaagctgcagctgagcaaggacacatacgacgacgacctggacaacctgctggcacagatcggagaccagtacgcagacctgttcctggcagcaaagaacctgagcgacgcaatcctgctgagcgacatcctgagagtcaacacagaaatcacaaaggcaccgctgagcgcaagcatgatcaagagatacgacgaacaccaccaggacctgacactgctgaaggcactggtcagacagcagctgccggaaaagtacaaggaaatcttcttcgaccagagcaagaacggatacgcaggatacatcgacggaggagcaagccaggaagaattctacaagttcatcaagccgatcctggaaaagatggacggaacagaagaactgctggtcaagctgaacagagaagacctgctgagaaagcagagaacattcgacaacggaagcatcccgcaccagatccacctgggagaactgcacgcaatcctgagaagacaggaagacttctacccgttcctgaaggacaacagagaaaagatcgaaaagatcctgacattcagaatcccgtactacgtcggaccgctggcaagaggaaacagcagattcgcatggatgacaagaaagagcgaagaaacaatcacaccgtggaacttcgaagaagtcgtcgacaagggagcaagcgcacagagcttcatcgaaagaatgacaaacttcgacaagaacctgccgaacgaaaaggtcctgccgaagcacagcctgctgtacgaatacttcacagtctacaacgaactgacaaaggtcaagtacgtcacagaaggaatgagaaagccggcattcctgagcggagaacagaagaaggcaatcgtcgacctgctgttcaagacaaacagaaaggtcacagtcaagcagctgaaggaagactacttcaagaagatcgaatgcttcgacagcgtcgaaatcagcggagtcgaagacagattcaacgcaagcctgggaacataccacgacctgctgaagatcatcaaggacaaggacttcctggacaacgaagaaaacgaagacatcctggaagacatcgtcctgacactgacactgttcgaagacagagaaatgatcgaagaaagactgaagacatacgcacacctgttcgacgacaaggtcatgaagcagctgaagagaagaagatacacaggatggggaagactgagcagaaagctgatcaacggaatcagagacaagcagagcggaaagacaatcctggacttcctgaagagcgacggattcgcaaacagaaacttcatgcagctgatccacgacgacagcctgacattcaaggaagacatccagaaggcacaggtcagcggacagggagacagcctgcacgaacacatcgcaaacctggcaggaagcccggcaatcaagaagggaatcctgcagacagtcaaggtcgtcgacgaactggtcaaggtcatgggaagacacaagccggaaaacatcgtcatcgaaatggcaagagaaaaccagacaacacagaagggacagaagaacagcagagaaagaatgaagagaatcgaagaaggaatcaaggaactgggaagccagatcctgaaggaacacccggtcgaaaacacacagctgcagaacgaaaagctgtacctgtactacctgcaaaacggaagagacatgtacgtcgaccaggaactggacatcaacagactgagcgactacgacgtcgaccacatcgtcccgcagagcttcctgaaggacgacagcatcgacaacaaggtcctgacaagaagcgacaagaacagaggaaagagcgacaacgtcccgagcgaagaagtcgtcaagaagatgaagaactactggagacagctgctgaacgcaaagctgatcacacagagaaagttcgacaacctgacaaaggcagagagaggaggactgagcgaactggacaaggcaggattcatcaagagacagctggtcgaaacaagacagatcacaaagcacgtcgcacagatcctggacagcagaatgaacacaaagtacgacgaaaacgacaagctgatcagagaagtcaaggtcatcacactgaagagcaagctggtcagcgacttcagaaaggacttccagttctacaaggtcagagaaatcaacaactaccaccacgcacacgacgcatacctgaacgcagtcgtcggaacagcactgatcaagaagtacccgaagctggaaagcgaattcgtctacggagactacaaggtctacgacgtcagaaagatgatcgcaaagagcgaacaggaaatcggaaaggcaacagcaaagtacttcttctacagcaacatcatgaacttcttcaagacagaaatcacactggcaaacggagaaatcagaaagagaccgctgatcgaaacaaacggagaaacaggagaaatcgtctgggacaagggaagagacttcgcaacagtcagaaaggtcctgagcatgccgcaggtcaacatcgtcaagaagacagaagtccagacaggaggattcagcaaggaaagcatcctgccgaagagaaacagcgacaagctgatcgcaagaaagaaggactgggacccgaagaagtacggaggattcgacagcccgacagtcgcatacagcgtcctggtcgtcgcaaaggtcgaaaagggaaagagcaagaagctgaagagcgtcaaggaactgctgggaatcacaatcatggaaagaagcagcttcgaaaagaacccgatcgacttcctggaagcaaagggatacaaggaagtcaagaaggacctgatcatcaagctgccgaagtacagcctgttcgaactggaaaacggaagaaagagaatgctggcaagcgcaggagaactgcagaagggaaacgaactggcactgccgagcaagtacgtcaacttcctgtacctggcaagccactacgaaaagctgaagggaagcccggaagacaacgaacagaagcagctgttcgtcgaacagcacaagcactacctggacgaaatcatcgaacagatcagcgaattcagcaagagagtcatcctggcagacgcaaacctggacaaggtcctgagcgcatacaacaagcacagagacaagccgatcagagaacaggcagaaaacatcatccacctgttcacactgacaaacctgggagcaccggcagcattcaagtacttcgacacaacaatcgacagaaagagatacacaagcacaaaggaagtcctggacgcaacactgatccaccagagcatcacaggactgtacgaaacaagaatcgacctgagccagctgggaggagacggaggaggaagcccgaagaagaagagaaaggtctag

SEQ ID NO: 508 - DNA, 4140 bp, synthetic construct
  misc_feature 1..4140: note = Synthetic
  source 1..4140: mol_type = other DNA
atggacaagaagtacagcatcggcctggacatcggcaccaacagcgtgggctgggccgtgatcaccgacgagtacaaggtgcccagcaagaagttcaaggtgctgggcaacaccgacagacacagcatcaagaagaacctgatcggcgccctgctgttcgacagcggcgagaccgccgaggccaccagactgaagagaaccgccagaagaagatacaccagaagaaagaacagaatctgctacctgcaggagatcttcagcaacgagatggccaaggtggacgacagcttcttccacagactggaggagagcttcctggtggaggaggacaagaagcacgagagacaccccatcttcggcaacatcgtggacgaggtggcctaccacgagaagtaccccaccatctaccacctgagaaagaagctggtggacagcaccgacaaggccgacctgagactgatctacctggccctggcccacatgatcaagttcagaggccacttcctgatcgagggcgacctgaaccccgacaacagcgacgtggacaagctgttcatccagctggtgcagacctacaaccagctgttcgaggagaaccccatcaacgccagcggcgtggacgccaaggccatcctgagcgccagactgagcaagagcagaagactggagaacctgatcgcccagctgcccggcgagaagaagaacggcctgttcggcaacctgatcgccctgagcctgggcctgacccccaacttcaagagcaacttcgacctggccgaggacgccaagctgcagctgagcaaggacacctacgacgacgacctggacaacctgctggcccagatcggcgaccagtacgccgacctgttcctggccgccaagaacctgagcgacgccatcctgctgagcgacatcctgagagtgaacaccgagatcaccaaggcccccctgagcgccagcatgatcaagagatacgacgagcaccaccaggacctgaccctgctgaaggccctggtgagacagcagctgcccgagaagtacaaggagatcttcttcgaccagagcaagaacggctacgccggctacatcgacggcggcgccagccaggaggagttctacaagttcatcaagcccatcctggagaagatggacggcaccgaggagctgctggtgaagctgaacagagaggacctgctgagaaagcagagaaccttcgacaacggcagcatcccccaccagatccacctgggcgagctgcacgccatcctgagaagacaggaggacttctaccccttcctgaaggacaacagagagaagatcgagaagatcctgaccttcagaatcccctactacgtgggccccctggccagaggcaacagcagattcgcctggatgaccagaaagagcgaggagaccatcaccccctggaacttcgaggaggtggtggacaagggcgccagcgcccagagcttcatcgagagaatgaccaacttcgacaagaacctgcccaacgagaaggtgctgcccaagcacagcctgctgtacgagtacttcaccgtgtacaacgagctgaccaaggtgaagtacgtgaccgagggcatgagaaagcccgccttcctgagcggcgagcagaagaaggccatcgtggacctgctgttcaagaccaacagaaaggtgaccgtgaagcagctgaaggaggactacttcaagaagatcgagtgcttcgacagcgtggagatcagcggcgtggaggacagattcaacgccagcctgggcacctaccacgacctgctgaagatcatcaaggacaaggacttcctggacaacgaggagaacgaggacatcctggaggacatcgtgctgaccctgaccctgttcgaggacagagagatgatcgaggagagactgaagacctacgcccacctgttcgacgacaaggtgatgaagcagctgaagagaagaagatacaccggctggggcagactgagcagaaagctgatcaacggcatcagagacaagcagagcggcaagaccatcctggacttcctgaagagcgacggcttcgccaacagaaacttcatgcagctgatccacgacgacagcctgaccttcaaggaggacatccagaaggcccaggtgagcggccagggcgacagcctgcacgagcacatcgccaacctggccggcagccccgccatcaagaagggcatcctgcagaccgtgaaggtggtggacgagctggtgaaggtgatgggcagacacaagcccgagaacatcgtgatcgagatggccagagagaaccagaccacccagaagggccagaagaacagcagagagagaatgaagagaatcgaggagggcatcaaggagctgggcagccagatcctgaaggagcaccccgtggagaacacccagctgcagaacgagaagctgtacctgtactacctgcagaacggcagagacatgtacgtggaccaggagctggacatcaacagactgagcgactacgacgtggaccacatcgtgccccagagcttcctgaaggacgacagcatcgacaacaaggtgctgaccagaagcgacaagaacagaggcaagagcgacaacgtgcccagcgaggaggtggtgaagaagatgaagaactactggagacagctgctgaacgccaagctgatcacccagagaaagttcgacaacctgaccaaggccgagagaggcggcctgagcgagctggacaaggccggcttcatcaagagacagctggtggagaccagacagatcaccaagcacgtggcccagatcctggacagcagaatgaacaccaagtacgacgagaacgacaagctgatcagagaggtgaaggtgatcaccctgaagagcaagctggtgagcgacttcagaaaggacttccagttctacaaggtgagagagatcaacaactaccaccacgcccacgacgcctacctgaacgccgtggtgggcaccgccctgatcaagaagtaccccaagctggagagcgagttcgtgtacggcgactacaaggtgtacgacgtgagaaagatgatcgccaagagcgagcaggagatcggcaaggccaccgccaagtacttcttctacagcaacatcatgaacttcttcaagaccgagatcaccctggccaacggcgagatcagaaagagacccctgatcgagaccaacggcgagaccggcgagatcgtgtgggacaagggcagagacttcgccaccgtgagaaaggtgctgagcatgccccaggtgaacatcgtgaagaagaccgaggtgcagaccggcggcttcagcaaggagagcatcctgcccaagagaaacagcgacaagctgatcgccagaaagaaggactgggaccccaagaagtacggcggcttcgacagccccaccgtggcctacagcgtgctggtggtggccaaggtggagaagggcaagagcaagaagctgaagagcgtgaaggagctgctgggcatcaccatcatggagagaagcagcttcgagaagaaccccatcgacttcctggaggccaagggctacaaggaggtgaagaaggacctgatcatcaagctgcccaagtacagcctgttcgagctggagaacggcagaaagagaatgctggccagcgccggcgagctgcagaagggcaacgagctggccctgcccagcaagtacgtgaacttcctgtacctggccagccactacgagaagctgaagggcagccccgaggacaacgagcagaagcagctgttcgtggagcagcacaagcactacctggacgagatcatcgagcagatcagcgagttcagcaagagagtgatcctggccgacgccaacctggacaaggtgctgagcgcctacaacaagcacagagacaagcccatcagagagcaggccgagaacatcatccacctgttcaccctgaccaacctgggcgcccccgccgccttcaagtacttcgacaccaccatcgacagaaagagatacaccagcaccaaggaggtgctggacgccaccctgatccaccagagcatcaccggcctgtacgagaccagaatcgacctgagccagctgggcggcgacggcggcggcagccccaagaagaagagaaaggtgtga

SEQ ID NO: 509 - DNA, 4411 bp, synthetic construct
  misc_feature 1..4411: note = Synthetic
  source 1..4411: mol_type = other DNA
gggtcccgcagtcggcgtccagcggctctgcttgttcgtgtgtgtgtcgttgcaggccttattcggatccgccaccatggacaagaagtacagcatcggcctggacatcggcaccaacagcgtgggctgggccgtgatcaccgacgagtacaaggtgcccagcaagaagttcaaggtgctgggcaacaccgacagacacagcatcaagaagaacctgatcggcgccctgctgttcgacagcggcgagaccgccgaggccaccagactgaagagaaccgccagaagaagatacaccagaagaaagaacagaatctgctacctgcaggagatcttcagcaacgagatggccaaggtggacgacagcttcttccacagactggaggagagcttcctggtggaggaggacaagaagcacgagagacaccccatcttcggcaacatcgtggacgaggtggcctaccacgagaagtaccccaccatctaccacctgagaaagaagctggtggacagcaccgacaaggccgacctgagactgatctacctggccctggcccacatgatcaagttcagaggccacttcctgatcgagggcgacctgaaccccgacaacagcgacgtggacaagctgttcatccagctggtgcagacctacaaccagctgttcgaggagaaccccatcaacgccagcggcgtggacgccaaggccatcctgagcgccagactgagcaagagcagaagactggagaacctgatcgcccagctgcccggcgagaagaagaacggcctgttcggcaacctgatcgccctgagcctgggcctgacccccaacttcaagagcaacttcgacctggccgaggacgccaagctgcagctgagcaaggacacctacgacgacgacctggacaacctgctggcccagatcggcgaccagtacgccgacctgttcctggccgccaagaacctgagcgacgccatcctgctgagcgacatcctgagagtgaacaccgagatcaccaaggcccccctgagcgccagcatgatcaagagatacgacgagcaccaccaggacctgaccctgctgaaggccctggtgagacagcagctgcccgagaagtacaaggagatcttcttcgaccagagcaagaacggctacgccggctacatcgacggcggcgccagccaggaggagttctacaagttcatcaagcccatcctggagaagatggacggcaccgaggagctgctggtgaagctgaacagagaggacctgctgagaaagcagagaaccttcgacaacggcagcatcccccaccagatccacctgggcgagctgcacgccatcctgagaagacaggaggacttctaccccttcctgaaggacaacagagagaagatcgagaagatcctgaccttcagaatcccctactacgtgggccccctggccagaggcaacagcagattcgcctggatgaccagaaagagcgaggagaccatcaccccctggaacttcgaggaggtggtggacaagggcgccagcgcccagagcttcatcgagagaatgaccaacttcgacaagaacctgcccaacgagaaggtgctgcccaagcacagcctgctgtacgagtacttcaccgtgtacaacgagctgaccaaggtgaagtacgtgaccgagggcatgagaaagcccgccttcctgagcggcgagcagaagaaggccatcgtggacctgctgttcaagaccaacagaaaggtgaccgtgaagcagctgaaggaggactacttcaagaagatcgagtgcttcgacagcgtggagatcagcggcgtggaggacagattcaacgccagcctgggcacctaccacgacctgctgaagatcatcaaggacaaggacttcctggacaacgaggagaacgaggacatcctggaggacatcgtgctgaccctgaccctgttcgaggacagagagatgatcgaggagagactgaagacctacgcccacctgttcgacgacaaggtgatgaagcagctgaagagaagaagatacaccggctggggcagactgagcagaaagctgatcaacggcatcagagacaagcagagcggcaagaccatcctggacttcctgaagagcgacggcttcgccaacagaaacttcatgcagctgatccacgacgacagcctgaccttcaaggaggacatccagaaggcccaggtgagcggccagggcgacagcctgcacgagcacatcgccaacctggccggcagccccgccatcaagaagggcatcctgcagaccgtgaaggtggtggacgagctggtgaaggtgatgggcagacacaagcccgagaacatcgtgatcgagatggccagagagaaccagaccacccagaagggccagaagaacagcagagagagaatgaagagaatcgaggagggcatcaaggagctgggcagccagatcctgaaggagcaccccgtggagaacacccagctgcagaacgagaagctgtacctgtactacctgcagaacggcagagacatgtacgtggaccaggagctggacatcaacagactgagcgactacgacgtggaccacatcgtgccccagagcttcctgaaggacgacagcatcgacaacaaggtgctgaccagaagcgacaagaacagaggcaagagcgacaacgtgcccagcgaggaggtggtgaagaagatgaagaactactggagacagctgctgaacgccaagctgatcacccagagaaagttcgacaacctgaccaaggccgagagaggcggcctgagcgagctggacaaggccggcttcatcaagagacagctggtggagaccagacagatcaccaagcacgtggcccagatcctggacagcagaatgaacaccaagtacgacgagaacgacaagctgatcagagaggtgaaggtgatcaccctgaagagcaagctggtgagcgacttcagaaaggacttccagttctacaaggtgagagagatcaacaactaccaccacgcccacgacgcctacctgaacgccgtggtgggcaccgccctgatcaagaagtaccccaagctggagagcgagttcgtgtacggcgactacaaggtgtacgacgtgagaaagatgatcgccaagagcgagcaggagatcggcaaggccaccgccaagtacttcttctacagcaacatcatgaacttcttcaagaccgagatcaccctggccaacggcgagatcagaaagagacccctgatcgagaccaacggcgagaccggcgagatcgtgtgggacaagggcagagacttcgccaccgtgagaaaggtgctgagcatgccccaggtgaacatcgtgaagaagaccgaggtgcagaccggcggcttcagcaaggagagcatcctgcccaagagaaacagcgacaagctgatcgccagaaagaaggactgggaccccaagaagtacggcggcttcgacagccccaccgtggcctacagcgtgctggtggtggccaaggtggagaagggcaagagcaagaagctgaagagcgtgaaggagctgctgggcatcaccatcatggagagaagcagcttcgagaagaaccccatcgacttcctggaggccaagggctacaaggaggtgaagaaggacctgatcatcaagctgcccaagtacagcctgttcgagctggagaacggcagaaagagaatgctggccagcgccggcgagctgcagaagggcaacgagctggccctgcccagcaagtacgtgaacttcctgtacctggccagccactacgagaagctgaagggcagccccgaggacaacgagcagaagcagctgttcgtggagcagcacaagcactacctggacgagatcatcgagcagatcagcgagttcagcaagagagtgatcctggccgacgccaacctggacaaggtgctgagcgcctacaacaagcacagagacaagcccatcagagagcaggccgagaacatcatccacctgttcaccctgaccaacctgggcgcccccgccgccttcaagtacttcgacaccaccatcgacagaaagagatacaccagcaccaaggaggtgctggacgccaccctgatccaccagagcatcaccggcctgtacgagaccagaatcgacctgagccagctgggcggcgacggcggcggcagccccaagaagaagagaaaggtgtgactagccatcacatttaaaagcatctcagcctaccatgagaataagagaaagaaaatgaagatcaatagcttattcatctctttttctttttcgttggtgtaaagccaacaccctgtctaaaaaacataaatttctttaatcattttgcctcttttctctgtgcttcaattaataaaaaatggaaagaacctcgag

SEQ ID NO: 510 - DNA, 4140 bp, synthetic construct
  misc_feature 1..4140: note = Synthetic
  source 1..4140: mol_type = other DNA
atggacaagaagtactctatcggtttggacatcggtaccaactctgtcggttgggccgtcatcaccgacgaatacaaggtcccatctaagaagttcaaggtcttgggtaacaccgacagacactctatcaagaagaacttgatcggtgccttgttgttcgactctggtgaaaccgccgaagccaccagattgaagagaaccgccagaagaagatacaccagaagaaagaacagaatctgctacttgcaagaaatcttctctaacgaaatggccaaggtcgacgactctttcttccacagattggaagaatctttcttggtcgaagaagacaagaagcacgaaagacacccaatcttcggtaacatcgtcgacgaagtcgcctaccacgaaaagtacccaaccatctaccacttgagaaagaagttggtcgactctaccgacaaggccgacttgagattgatctacttggccttggcccacatgatcaagttcagaggtcacttcttgatcgaaggtgacttgaacccagacaactctgacgtcgacaagttgttcatccaattggtccaaacctacaaccaattgttcgaagaaaacccaatcaacgcctctggtgtcgacgccaaggccatcttgtctgccagattgtctaagagcagaagattggaaaacttgatcgcccaattgccaggtgaaaagaagaacggtttgttcggtaacttgatcgccttgtctttgggtttgaccccaaacttcaagtctaacttcgacttggccgaagacgccaagttgcaattgtctaaggacacctacgacgacgacttggacaacttgttggcccaaatcggtgaccaatacgccgacttgttcttggccgccaagaacttgtctgacgccatcttgttgtctgacatcttgagagtcaacaccgaaatcaccaaggccccattgtctgcctctatgatcaagagatacgacgaacaccaccaagacttgaccttgttgaaggccttggtcagacaacaattgccagaaaagtacaaggaaatcttcttcgaccaatctaagaacggttacgccggttacatcgacggtggtgcctctcaagaagaattctacaagttcatcaagccaatcttggaaaagatggacggtaccgaagaattgttggtcaagttgaacagagaagacttgttgagaaagcaaagaaccttcgacaacggttctatcccacaccaaatccacttgggtgaattgcacgccatcttgagaagacaagaagacttctacccattcttgaaggacaacagagaaaagatcgaaaagatcttgaccttcagaatcccatactacgtcggtccattggccagaggtaacagcagattcgcctggatgaccagaaagtctgaagaaaccatcaccccatggaacttcgaagaagtcgtcgacaagggtgcctctgcccaatctttcatcgaaagaatgaccaacttcgacaagaacttgccaaacgaaaaggtcttgccaaagcactctttgttgtacgaatacttcaccgtctacaacgaattgaccaaggtcaagtacgtcaccgaaggtatgagaaagccagccttcttgtctggtgaacaaaagaaggccatcgtcgacttgttgttcaagaccaacagaaaggtcaccgtcaagcaattgaaggaagactacttcaagaagatcgaatgcttcgactctgtcgaaatctctggtgtcgaagacagattcaacgcctctttgggtacctaccacgacttgttgaagatcatcaaggacaaggacttcttggacaacgaagaaaacgaagacatcttggaagacatcgtcttgaccttgaccttgttcgaagacagagaaatgatcgaagaaagattgaagacctacgcccacttgttcgacgacaaggtcatgaagcaattgaagagaagaagatacaccggttggggtagattgagcagaaagttgatcaacggtatcagagacaagcaatctggtaagaccatcttggacttcttgaagtctgacggtttcgccaacagaaacttcatgcaattgatccacgacgactctttgaccttcaaggaagacatccaaaaggcccaagtctctggtcaaggtgactctttgcacgaacacatcgccaacttggccggttctccagccatcaagaagggtatcttgcaaaccgtcaaggtcgtcgacgaattggtcaaggtcatgggtagacacaagccagaaaacatcgtcatcgaaatggccagagaaaaccaaaccacccaaaagggtcaaaagaacagcagagaaagaatgaagagaatcgaagaaggtatcaaggaattgggttctcaaatcttgaaggaacacccagtcgaaaacacccaattgcaaaacgaaaagttgtacttgtactacttgcaaaacggtagagacatgtacgtcgaccaagaattggacatcaacagattgtctgactacgacgtcgaccacatcgtcccacaatctttcttgaaggacgactctatcgacaacaaggtcttgaccagatctgacaagaacagaggtaagtctgacaacgtcccatctgaagaagtcgtcaagaagatgaagaactactggagacaattgttgaacgccaagttgatcacccaaagaaagttcgacaacttgaccaaggccgaaagaggtggtttgtctgaattggacaaggccggtttcatcaagagacaattggtcgaaaccagacaaatcaccaagcacgtcgcccaaatcttggacagcagaatgaacaccaagtacgacgaaaacgacaagttgatcagagaagtcaaggtcatcaccttgaagtctaagttggtctctgacttcagaaaggacttccaattctacaaggtcagagaaatcaacaactaccaccacgcccacgacgcctacttgaacgccgtcgtcggtaccgccttgatcaagaagtacccaaagttggaatctgaattcgtctacggtgactacaaggtctacgacgtcagaaagatgatcgccaagtctgaacaagaaatcggtaaggccaccgccaagtacttcttctactctaacatcatgaacttcttcaagaccgaaatcaccttggccaacggtgaaatcagaaagagaccattgatcgaaaccaacggtgaaaccggtgaaatcgtctgggacaagggtagagacttcgccaccgtcagaaaggtcttgtctatgccacaagtcaacatcgtcaagaagaccgaagtccaaaccggtggtttctctaaggaatctatcttgccaaagagaaactctgacaagttgatcgccagaaagaaggactgggacccaaagaagtacggtggtttcgactctccaaccgtcgcctactctgtcttggtcgtcgccaaggtcgaaaagggtaagtctaagaagttgaagtctgtcaaggaattgttgggtatcaccatcatggaaagatcttctttcgaaaagaacccaatcgacttcttggaagccaagggttacaaggaagtcaagaaggacttgatcatcaagttgccaaagtactctttgttcgaattggaaaacggtagaaagagaatgttggcctctgccggtgaattgcaaaagggtaacgaattggccttgccatctaagtacgtcaacttcttgtacttggcctctcactacgaaaagttgaagggttctccagaagacaacgaacaaaagcaattgttcgtcgaacaacacaagcactacttggacgaaatcatcgaacaaatctctgaattctctaagagagtcatcttggccgacgccaacttggacaaggtcttgtctgcctacaacaagcacagagacaagccaatcagagaacaagccgaaaacatcatccacttgttcaccttgaccaacttgggtgccccagccgccttcaagtacttcgacaccaccatcgacagaaagagatacacctctaccaaggaagtcttggacgccaccttgatccaccaatctatcaccggtttgtacgaaaccagaatcgacttgtctcaattgggtggtgacggtggtggttctccaaagaagaagagaaaggtctaa

SEQ ID NO: 511 - DNA, 4140 bp, synthetic construct
  misc_feature 1..4140: note = Synthetic
  source 1..4140: mol_type = other DNA
atggacaagaagtactccatcggcctggacatcggcaccaactccgtgggctgggccgtgatcaccgacgagtacaaggtgccctccaagaagttcaaggtgctgggcaacaccgaccggcactccatcaagaagaacctgatcggcgccctgctgttcgactccggcgagaccgccgaggccacccggctgaagcggaccgcccggcggcggtacacccggcggaagaaccggatctgctacctgcaggagatcttctccaacgagatggccaaggtggacgactccttcttccaccggctggaggagtccttcctggtggaggaggacaagaagcacgagcggcaccccatcttcggcaacatcgtggacgaggtggcctaccacgagaagtaccccaccatctaccacctgcggaagaagctggtggactccaccgacaaggccgacctgcggctgatctacctggccctggcccacatgatcaagttccggggccacttcctgatcgagggcgacctgaaccccgacaactccgacgtggacaagctgttcatccagctggtgcagacctacaaccagctgttcgaggagaaccccatcaacgcctccggcgtggacgccaaggccatcctgtccgcccggctgtccaagtcccggcggctggagaacctgatcgcccagctgcccggcgagaagaagaacggcctgttcggcaacctgatcgccctgtccctgggcctgacccccaacttcaagtccaacttcgacctggccgaggacgccaagctgcagctgtccaaggacacctacgacgacgacctggacaacctgctggcccagatcggcgaccagtacgccgacctgttcctggccgccaagaacctgtccgacgccatcctgctgtccgacatcctgcgggtgaacaccgagatcaccaaggcccccctgtccgcctccatgatcaagcggtacgacgagcaccaccaggacctgaccctgctgaaggccctggtgcggcagcagctgcccgagaagtacaaggagatcttcttcgaccagtccaagaacggctacgccggctacatcgacggcggcgcctcccaggaggagttctacaagttcatcaagcccatcctggagaagatggacggcaccgaggagctgctggtgaagctgaaccgggaggacctgctgcggaagcagcggaccttcgacaacggctccatcccccaccagatccacctgggcgagctgcacgccatcctgcggcggcaggaggacttctaccccttcctgaaggacaaccgggagaagatcgagaagatcctgaccttccggatcccctactacgtgggccccctggcccggggcaactcccggttcgcctggatgacccggaagtccgaggagaccatcaccccctggaacttcgaggaggtggtggacaagggcgcctccgcccagtccttcatcgagcggatgaccaacttcgacaagaacctgcccaacgagaaggtgctgcccaagcactccctgctgtacgagtacttcaccgtgtacaacgagctgaccaaggtgaagtacgtgaccgagggcatgcggaagcccgccttcctgtccggcgagcagaagaaggccatcgtggacctgctgttcaagaccaaccggaaggtgaccgtgaagcagctgaaggaggactacttcaagaagatcgagtgcttcgactccgtggagatctccggcgtggaggaccggttcaacgcctccctgggcacctaccacgacctgctgaagatcatcaaggacaaggacttcctggacaacgaggagaacgaggacatcctggaggacatcgtgctgaccctgaccctgttcgaggaccgggagatgatcgaggagcggctgaagacctacgcccacctgttcgacgacaaggtgatgaagcagctgaagcggcggcggtacaccggctggggccggctgtcccggaagctgatcaacggcatccgggacaagcagtccggcaagaccatcctggacttcctgaagtccgacggcttcgccaaccggaacttcatgcagctgatccacgacgactccctgaccttcaaggaggacatccagaaggcccaggtgtccggccagggcgactccctgcacgagcacatcgccaacctggccggctcccccgccatcaagaagggcatcctgcagaccgtgaaggtggtggacgagctggtgaaggtgatgggccggcacaagcccgagaacatcgtgatcgagatggcccgggagaaccagaccacccagaagggccagaagaactcccgggagcggatgaagcggatcgaggagggcatcaaggagctgggctcccagatcctgaaggagcaccccgtggagaacacccagctgcagaacgagaagctgtacctgtactacctgcagaacggccgggacatgtacgtggaccaggagctggacatcaaccggctgtccgactacgacgtggaccacatcgtgccccagtccttcctgaaggacgactccatcgacaacaaggtgctgacccggtccgacaagaaccggggcaagtccgacaacgtgccctccgaggaggtggtgaagaagatgaagaactactggcggcagctgctgaacgccaagctgatcacccagcggaagttcgacaacctgaccaaggccgagcggggcggcctgtccgagctggacaaggccggcttcatcaagcggcagctggtggagacccggcagatcaccaagcacgtggcccagatcctggactcccggatgaacaccaagtacgacgagaacgacaagctgatccgggaggtgaaggtgatcaccctgaagtccaagctggtgtccgacttccggaaggacttccagttctacaaggtgcgggagatcaacaactaccaccacgcccacgacgcctacctgaacgccgtggtgggcaccgccctgatcaagaagtaccccaagctggagtccgagttcgtgtacggcgactacaaggtgtacgacgtgcggaagatgatcgccaagtccgagcaggagatcggcaaggccaccgccaagtacttcttctactccaacatcatgaacttcttcaagaccgagatcaccctggccaacggcgagatccggaagcggcccctgatcgagaccaacggcgagaccggcgagatcgtgtgggacaagggccgggacttcgccaccgtgcggaaggtgctgtccatgccccaggtgaacatcgtgaagaagaccgaggtgcagaccggcggcttctccaaggagtccatcctgcccaagcggaactccgacaagctgatcgcccggaagaaggactgggaccccaagaagtacggcggcttcgactcccccaccgtggcctactccgtgctggtggtggccaaggtggagaagggcaagtccaagaagctgaagtccgtgaaggagctgctgggcatcaccatcatggagcggtcctccttcgagaagaaccccatcgacttcctggaggccaagggctacaaggaggtgaagaaggacctgatcatcaagctgcccaagtactccctgttcgagctggagaacggccggaagcggatgctggcctccgccggcgagctgcagaagggcaacgagctggccctgccctccaagtacgtgaacttcctgtacctggcctcccactacgagaagctgaagggctcccccgaggacaacgagcagaagcagctgttcgtggagcagcacaagcactacctggacgagatcatcgagcagatctccgagttctccaagcgggtgatcctggccgacgccaacctggacaaggtgctgtccgcctacaacaagcaccgggacaagcccatccgggagcaggccgagaacatcatccacctgttcaccctgaccaacctgggcgcccccgccgccttcaagtacttcgacaccaccatcgaccggaagcggtacacctccaccaaggaggtgctggacgccaccctgatccaccagtccatcaccggcctgtacgagacccggatcgacctgtcccagctgggcggcgacggcggcggctcccccaagaagaagcggaaggtgtga

SEQ ID NO: 512 - DNA, 4140 bp, synthetic construct
  misc_feature 1..4140: note = Synthetic
  source 1..4140: mol_type = other DNA
atggacaagaagtacagcatcggcctggacatcggcaccaacagcgtgggctgggccgtgatcaccgacgagtacaaggtgcccagcaagaagttcaaggtgctgggcaacaccgaccggcacagcatcaagaagaacctgatcggcgccctgctgttcgacagcggcgagaccgccgaggccacccggctgaagcggaccgcccggcggcggtacacccggcggaagaaccggatctgctacctgcaggagatcttcagcaacgagatggccaaggtggacgacagcttcttccaccggctggaggagagcttcctggtggaggaggacaagaagcacgagcggcaccccatcttcggcaacatcgtggacgaggtggcctaccacgagaagtaccccaccatctaccacctgcggaagaagctggtggacagcaccgacaaggccgacctgcggctgatctacctggccctggcccacatgatcaagttccggggccacttcctgatcgagggcgacctgaaccccgacaacagcgacgtggacaagctgttcatccagctggtgcagacctacaaccagctgttcgaggagaaccccatcaacgccagcggcgtggacgccaaggccatcctgagcgcccggctgagcaagagccggcggctggagaacctgatcgcccagctgcccggcgagaagaagaacggcctgttcggcaacctgatcgccctgagcctgggcctgacccccaacttcaagagcaacttcgacctggccgaggacgccaagctgcagctgagcaaggacacctacgacgacgacctggacaacctgctggcccagatcggcgaccagtacgccgacctgttcctggccgccaagaacctgagcgacgccatcctgctgagcgacatcctgcgggtgaacaccgagatcaccaaggcccccctgagcgccagcatgatcaagcggtacgacgagcaccaccaggacctgaccctgctgaaggccctggtgcggcagcagctgcccgagaagtacaaggagatcttcttcgaccagagcaagaacggctacgccggctacatcgacggcggcgccagccaggaggagttctacaagttcatcaagcccatcctggagaagatggacggcaccgaggagctgctggtgaagctgaaccgggaggacctgctgcggaagcagcggaccttcgacaacggcagcatcccccaccagatccacctgggcgagctgcacgccatcctgcggcggcaggaggacttctaccccttcctgaaggacaaccgggagaagatcgagaagatcctgaccttccggatcccctactacgtgggccccctggcccggggcaacagccggttcgcctggatgacccggaagagcgaggagaccatcaccccctggaacttcgaggaggtggtggacaagggcgccagcgcccagagcttcatcgagcggatgaccaacttcgacaagaacctgcccaacgagaaggtgctgcccaagcacagcctgctgtacgagtacttcaccgtgtacaacgagctgaccaaggtgaagtacgtgaccgagggcatgcggaagcccgccttcctgagcggcgagcagaagaaggccatcgtggacctgctgttcaagaccaaccggaaggtgaccgtgaagcagctgaaggaggactacttcaagaagatcgagtgcttcgacagcgtggagatcagcggcgtggaggaccggttcaacgccagcctgggcacctaccacgacctgctgaagatcatcaaggacaaggacttcctggacaacgaggagaacgaggacatcctggaggacatcgtgctgaccctgaccctgttcgaggaccgggagatgatcgaggagcggctgaagacctacgcccacctgttcgacgacaaggtgatgaagcagctgaagcggcggcggtacaccggctggggccggctgagccggaagctgatcaacggcatccgggacaagcagagcggcaagaccatcctggacttcctgaagagcgacggcttcgccaaccggaacttcatgcagctgatccacgacgacagcctgaccttcaaggaggacatccagaaggcccaggtgagcggccagggcgacagcctgcacgagcacatcgccaacctggccggcagccccgccatcaagaagggcatcctgcagaccgtgaaggtggtggacgagctggtgaaggtgatgggccggcacaagcccgagaacatcgtgatcgagatggcccgggagaaccagaccacccagaagggccagaagaacagccgggagcggatgaagcggatcgaggagggcatcaaggagctgggcagccagatcctgaaggagcaccccgtggagaacacccagctgcagaacgagaagctgtacctgtactacctgcagaacggccgggacatgtacgtggaccaggagctggacatcaaccggctgagcgactacgacgtggaccacatcgtgccccagagcttcctgaaggacgacagcatcgacaacaaggtgctgacccggagcgacaagaaccggggcaagagcgacaacgtgcccagcgaggaggtggtgaagaagatgaagaactactggcggcagctgctgaacgccaagctgatcacccagcggaagttcgacaacctgaccaaggccgagcggggcggcctgagcgagctggacaaggccggcttcatcaagcggcagctggtggagacccggcagatcaccaagcacgtggcccagatcctggacagccggatgaacaccaagtacgacgagaacgacaagctgatccgggaggtgaaggtgatcaccctgaagagcaagctggtgagcgacttccggaaggacttccagttctacaaggtgcgggagatcaacaactaccaccacgcccacgacgcctacctgaacgccgtggtgggcaccgccctgatcaagaagtaccccaagctggagagcgagttcgtgtacggcgactacaaggtgtacgacgtgcggaagatgatcgccaagagcgagcaggagatcggcaaggccaccgccaagtacttcttctacagcaacatcatgaacttcttcaagaccgagatcaccctggccaacggcgagatccggaagcggcccctgatcgagaccaacggcgagaccggcgagatcgtgtgggacaagggccgggacttcgccaccgtgcggaaggtgctgagcatgccccaggtgaacatcgtgaagaagaccgaggtgcagaccggcggcttcagcaaggagagcatcctgcccaagcggaacagcgacaagctgatcgcccggaagaaggactgggaccccaagaagtacggcggcttcgacagccccaccgtggcctacagcgtgctggtggtggccaaggtggagaagggcaagagcaagaagctgaagagcgtgaaggagctgctgggcatcaccatcatggagcggagcagcttcgagaagaaccccatcgacttcctggaggccaagggctacaaggaggtgaagaaggacctgatcatcaagctgcccaagtacagcctgttcgagctggagaacggccggaagcggatgctggccagcgccggcgagctgcagaagggcaacgagctggccctgcccagcaagtacgtgaacttcctgtacctggccagccactacgagaagctgaagggcagccccgaggacaacgagcagaagcagctgttcgtggagcagcacaagcactacctggacgagatcatcgagcagatcagcgagttcagcaagcgggtgatcctggccgacgccaacctggacaaggtgctgagcgcctacaacaagcaccgggacaagcccatccgggagcaggccgagaacatcatccacctgttcaccctgaccaacctgggcgcccccgccgccttcaagtacttcgacaccaccatcgaccggaagcggtacaccagcaccaaggaggtgctggacgccaccctgatccaccagagcatcaccggcctgtacgagacccggatcgacctgagccagctgggcggcgacggcggcggcagccccaagaagaagcggaaggtgtga

SEQ ID NO: 513 - DNA, 4179 bp, synthetic construct
  misc_feature 1..4179: note = Synthetic
  source 1..4179: mol_type = other DNA
atggacaagaagtactccatcggcctggacatcggcaccaactccgtgggctgggccgtgatcaccgacgagtacaaggtgccctccaagaagttcaaggtgctgggcaacaccgaccggcactccatcaagaagaacctgatcggcgccctgctgttcgactccggcgagaccgccgaggccacccggctgaagcggaccgcccggcggcggtacacccggcggaagaaccggatctgctacctgcaggagatcttctccaacgagatggccaaggtggacgactccttcttccaccggctggaggagtccttcctggtggaggaggacaagaagcacgagcggcaccccatcttcggcaacatcgtggacgaggtggcctaccacgagaagtaccccaccatctaccacctgcggaagaagctggtggactccaccgacaaggccgacctgcggctgatctacctggccctggcccacatgatcaagttccggggccacttcctgatcgagggcgacctgaaccccgacaactccgacgtggacaagctgttcatccagctggtgcagacctacaaccagctgttcgaggagaaccccatcaacgcctccggcgtggacgccaaggccatcctgtccgcccggctgtccaagtcccggcggctggagaacctgatcgcccagctgcccggcgagaagaagaacggcctgttcggcaacctgatcgccctgtccctgggcctgacccccaacttcaagtccaacttcgacctggccgaggacgccaagctgcagctgtccaaggacacctacgacgacgacctggacaacctgctggcccagatcggcgaccagtacgccgacctgttcctggccgccaagaacctgtccgacgccatcctgctgtccgacatcctgcgggtgaacaccgagatcaccaaggcccccctgtccgcctccatgatcaagcggtacgacgagcaccaccaggacctgaccctgctgaaggccctggtgcggcagcagctgcccgagaagtacaaggagatcttcttcgaccagtccaagaacggctacgccggctacatcgacggcggcgcctcccaggaggagttctacaagttcatcaagcccatcctggagaagatggacggcaccgaggagctgctggtgaagctgaaccgggaggacctgctgcggaagcagcggaccttcgacaacggctccatcccccaccagatccacctgggcgagctgcacgccatcctgcggcggcaggaggacttctaccccttcctgaaggacaaccgggagaagatcgagaagatcctgaccttccggatcccctactacgtgggccccctggcccggggcaactcccggttcgcctggatgacccggaagtccgaggagaccatcaccccctggaacttcgaggaggtggtggacaagggcgcctccgcccagtccttcatcgagcggatgaccaacttcgacaagaacctgcccaacgagaaggtgctgcccaagcactccctgctgtacgagtacttcaccgtgtacaacgagctgaccaaggtgaagtacgtgaccgagggcatgcggaagcccgccttcctgtccggcgagcagaagaaggccatcgtggacctgctgttcaagaccaaccggaaggtgaccgtgaagcagctgaaggaggactacttcaagaagatcgagtgcttcgactccgtggagatctccggcgtggaggaccggttcaacgcctccctgggcacctaccacgacctgctgaagatcatcaaggacaaggacttcctggacaacgaggagaacgaggacatcctggaggacatcgtgctgaccctgaccctgttcgaggaccgggagatgatcgaggagcggctgaagacctacgcccacctgttcgacgacaaggtgatgaagcagctgaagcggcggcggtacaccggctggggccggctgtcccggaagctgatcaacggcatccgggacaagcagtccggcaagaccatcctggacttcctgaagtccgacggcttcgccaaccggaacttcatgcagctgatccacgacgactccctgaccttcaaggaggacatccagaaggcccaggtgtccggccagggcgactccctgcacgagcacatcgccaacctggccggctcccccgccatcaagaagggcatcctgcagaccgtgaaggtggtggacgagctggtgaaggtgatgggccggcacaagcccgagaacatcgtgatcgagatggcccgggagaaccagaccacccagaagggccagaagaactcccgggagcggatgaagcggatcgaggagggcatcaaggagctgggctcccagatcctgaaggagcaccccgtggagaacacccagctgcagaacgagaagctgtacctgtactacctgcagaacggccgggacatgtacgtggaccaggagctggacatcaaccggctgtccgactacgacgtggaccacatcgtgccccagtccttcctgaaggacgactccatcgacaacaaggtgctgacccggtccgacaagaaccggggcaagtccgacaacgtgccctccgaggaggtggtgaagaagatgaagaactactggcggcagctgctgaacgccaagctgatcacccagcggaagttcgacaacctgaccaaggccgagcggggcggcctgtccgagctggacaaggccggcttcatcaagcggcagctggtggagacccggcagatcaccaagcacgtggcccagatcctggactcccggatgaacaccaagtacgacgagaacgacaagctgatccgggaggtgaaggtgatcaccctgaagtccaagctggtgtccgacttccggaaggacttccagttctacaaggtgcgggagatcaacaactaccaccacgcccacgacgcctacctgaacgccgtggtgggcaccgccctgatcaagaagtaccccaagctggagtccgagttcgtgtacggcgactacaaggtgtacgacgtgcggaagatgatcgccaagtccgagcaggagatcggcaaggccaccgccaagtacttcttctactccaacatcatgaacttcttcaagaccgagatcaccctggccaacggcgagatccggaagcggcccctgatcgagaccaacggcgagaccggcgagatcgtgtgggacaagggccgggacttcgccaccgtgcggaaggtgctgtccatgccccaggtgaacatcgtgaagaagaccgaggtgcagaccggcggcttctccaaggagtccatcctgcccaagcggaactccgacaagctgatcgcccggaagaaggactgggaccccaagaagtacggcggcttcgactcccccaccgtggcctactccgtgctggtggtggccaaggtggagaagggcaagtccaagaagctgaagtccgtgaaggagctgctgggcatcaccatcatggagcggtcctccttcgagaagaaccccatcgacttcctggaggccaagggctacaaggaggtgaagaaggacctgatcatcaagctgcccaagtactccctgttcgagctggagaacggccggaagcggatgctggcctccgccggcgagctgcagaagggcaacgagctggccctgccctccaagtacgtgaacttcctgtacctggcctcccactacgagaagctgaagggctcccccgaggacaacgagcagaagcagctgttcgtggagcagcacaagcactacctggacgagatcatcgagcagatctccgagttctccaagcgggtgatcctggccgacgccaacctggacaaggtgctgtccgcctacaacaagcaccgggacaagcccatccgggagcaggccgagaacatcatccacctgttcaccctgaccaacctgggcgcccccgccgccttcaagtacttcgacaccaccatcgaccggaagcggtacacctccaccaaggaggtgctggacgccaccctgatccaccagtccatcaccggcctgtacgagacccggatcgacctgtcccagctgggcggcgacggctccggctcccccaagaagaagcggaaggtggacggctcccccaagaagaagcggaaggtggactccggctga

SEQ ID NO: 514 - DNA, 4179 bp, synthetic construct
  misc_feature 1..4179: note = Synthetic
  source 1..4179: mol_type = other DNA
atggacaagaagtacagcatcggcctggacatcggcaccaacagcgtgggctgggccgtgatcaccgacgagtacaaggtgcccagcaagaagttcaaggtgctgggcaacaccgaccggcacagcatcaagaagaacctgatcggcgccctgctgttcgacagcggcgagaccgccgaggccacccggctgaagcggaccgcccggcggcggtacacccggcggaagaaccggatctgctacctgcaggagatcttcagcaacgagatggccaaggtggacgacagcttcttccaccggctggaggagagcttcctggtggaggaggacaagaagcacgagcggcaccccatcttcggcaacatcgtggacgaggtggcctaccacgagaagtaccccaccatctaccacctgcggaagaagctggtggacagcaccgacaaggccgacctgcggctgatctacctggccctggcccacatgatcaagttccggggccacttcctgatcgagggcgacctgaaccccgacaacagcgacgtggacaagctgttcatccagctggtgcagacctacaaccagctgttcgaggagaaccccatcaacgccagcggcgtggacgccaaggccatcctgagcgcccggctgagcaagagccggcggctggagaacctgatcgcccagctgcccggcgagaagaagaacggcctgttcggcaacctgatcgccctgagcctgggcctgacccccaacttcaagagcaacttcgacctggccgaggacgccaagctgcagctgagcaaggacacctacgacgacgacctggacaacctgctggcccagatcggcgaccagtacgccgacctgttcctggccgccaagaacctgagcgacgccatcctgctgagcgacatcctgcgggtgaacaccgagatcaccaaggcccccctgagcgccagcatgatcaagcggtacgacgagcaccaccaggacctgaccctgctgaaggccctggtgcggcagcagctgcccgagaagtacaaggagatcttcttcgaccagagcaagaacggctacgccggctacatcgacggcggcgccagccaggaggagttctacaagttcatcaagcccatcctggagaagatggacggcaccgaggagctgctggtgaagctgaaccgggaggacctgctgcggaagcagcggaccttcgacaacggcagcatcccccaccagatccacctgggcgagctgcacgccatcctgcggcggcaggaggacttctaccccttcctgaaggacaaccgggagaagatcgagaagatcctgaccttccggatcccctactacgtgggccccctggcccggggcaacagccggttcgcctggatgacccggaagagcgaggagaccatcaccccctggaacttcgaggaggtggtggacaagggcgccagcgcccagagcttcatcgagcggatgaccaacttcgacaagaacctgcccaacgagaaggtgctgcccaagcacagcctgctgtacgagtacttcaccgtgtacaacgagctgaccaaggtgaagtacgtgaccgagggcatgcggaagcccgccttcctgagcggcgagcagaagaaggccatcgtggacctgctgttcaagaccaaccggaaggtgaccgtgaagcagctgaaggaggactacttcaagaagatcgagtgcttcgacagcgtggagatcagcggcgtggaggaccggttcaacgccagcctgggcacctaccacgacctgctgaagatcatcaaggacaaggacttcctggacaacgaggagaacgaggacatcctggaggacatcgtgctgaccctgaccctgttcgaggaccgggagatgatcgaggagcggctgaagacctacgcccacctgttcgacgacaaggtgatgaagcagctgaagcggcggcggtacaccggctggggccggctgagccggaagctgatcaacggcatccgggacaagcagagcggcaagaccatcctggacttcctgaagagcgacggcttcgccaaccggaacttcatgcagctgatccacgacgacagcctgaccttcaaggaggacatccagaaggcccaggtgagcggccagggcgacagcctgcacgagcacatcgccaacctggccggcagccccgccatcaagaagggcatcctgcagaccgtgaaggtggtggacgagctggtgaaggtgatgggccggcacaagcccgagaacatcgtgatcgagatggcccgggagaaccagaccacccagaagggccagaagaacagccgggagcggatgaagcggatcgaggagggcatcaaggagctgggcagccagatcctgaaggagcaccccgtggagaacacccagctgcagaacgagaagctgtacctgtactacctgcagaacggccgggacatgtacgtggaccaggagctggacatcaaccggctgagcgactacgacgtggaccacatcgtgccccagagcttcctgaaggacgacagcatcgacaacaaggtgctgacccggagcgacaagaaccggggcaagagcgacaacgtgcccagcgaggaggtggtgaagaagatgaagaactactggcggcagctgctgaacgccaagctgatcacccagcggaagttcgacaacctgaccaaggccgagcggggcggcctgagcgagctggacaaggccggcttcatcaagcggcagctggtggagacccggcagatcaccaagcacgtggcccagatcctggacagccggatgaacaccaagtacgacgagaacgacaagctgatccgggaggtgaaggtgatcaccctgaagagcaagctggtgagcgacttccggaaggacttccagttctacaaggtgcgggagatcaacaactaccaccacgcccacgacgcctacctgaacgccgtggtgggcaccgccctgatcaagaagtaccccaagctggagagcgagttcgtgtacggcgactacaaggtgtacgacgtgcggaagatgatcgccaagagcgagcaggagatcggcaaggccaccgccaagtacttcttctacagcaacatcatgaacttcttcaagaccgagatcaccctggccaacggcgagatccggaagcggcccctgatcgagaccaacggcgagaccggcgagatcgtgtgggacaagggccgggacttcgccaccgtgcggaaggtgctgagcatgccccaggtgaacatcgtgaagaagaccgaggtgcagaccggcggcttcagcaaggagagcatcctgcccaagcggaacagcgacaagctgatcgcccggaagaaggactgggaccccaagaagtacggcggcttcgacagccccaccgtggcctacagcgtgctggtggtggccaaggtggagaagggcaagagcaagaagctgaagagcgtgaaggagctgctgggcatcaccatcatggagcggagcagcttcgagaagaaccccatcgacttcctggaggccaagggctacaaggaggtgaagaaggacctgatcatcaagctgcccaagtacagcctgttcgagctggagaacggccggaagcggatgctggccagcgccggcgagctgcagaagggcaacgagctggccctgcccagcaagtacgtgaacttcctgtacctggccagccactacgagaagctgaagggcagccccgaggacaacgagcagaagcagctgttcgtggagcagcacaagcactacctggacgagatcatcgagcagatcagcgagttcagcaagcgggtgatcctggccgacgccaacctggacaaggtgctgagcgcctacaacaagcaccgggacaagcccatccgggagcaggccgagaacatcatccacctgttcaccctgaccaacctgggcgcccccgccgccttcaagtacttcgacaccaccatcgaccggaagcggtacaccagcaccaaggaggtgctggacgccaccctgatccaccagagcatcaccggcctgtacgagacccggatcgacctgagccagctgggcggcgacggcagcggcagccccaagaagaagcggaaggtggacggcagccccaagaagaagcggaaggtggacagcggctga

SEQ ID NO: 515 - DNA, 4107 bp, synthetic construct
  misc_feature 1..4107: note = Synthetic
  source 1..4107: mol_type = other DNA
atggacaagaagtacagcatcggcctggacatcggcaccaacagcgtgggctgggccgtgatcaccgacgagtacaaggtgcccagcaagaagttcaaggtgctgggcaacaccgaccggcacagcatcaagaagaacctgatcggcgccctgctgttcgacagcggcgagaccgccgaggccacccggctgaagcggaccgcccggcggcggtacacccggcggaagaaccggatctgctacctgcaggagatcttcagcaacgagatggccaaggtggacgacagcttcttccaccggctggaggagagcttcctggtggaggaggacaagaagcacgagcggcaccccatcttcggcaacatcgtggacgaggtggcctaccacgagaagtaccccaccatctaccacctgcggaagaagctggtggacagcaccgacaaggccgacctgcggctgatctacctggccctggcccacatgatcaagttccggggccacttcctgatcgagggcgacctgaaccccgacaacagcgacgtggacaagctgttcatccagctggtgcagacctacaaccagctgttcgaggagaaccccatcaacgccagcggcgtggacgccaaggccatcctgagcgcccggctgagcaagagccggcggctggagaacctgatcgcccagctgcccggcgagaagaagaacggcctgttcggcaacctgatcgccctgagcctgggcctgacccccaacttcaagagcaacttcgacctggccgaggacgccaagctgcagctgagcaaggacacctacgacgacgacctggacaacctgctggcccagatcggcgaccagtacgccgacctgttcctggccgccaagaacctgagcgacgccatcctgctgagcgacatcctgcgggtgaacaccgagatcaccaaggcccccctgagcgccagcatgatcaagcggtacgacgagcaccaccaggacctgaccctgctgaaggccctggtgcggcagcagctgcccgagaagtacaaggagatcttcttcgaccagagcaagaacggctacgccggctacatcgacggcggcgccagccaggaggagttctacaagttcatcaagcccatcctggagaagatggacggcaccgaggagctgctggtgaagctgaaccgggaggacctgctgcggaagcagcggaccttcgacaacggcagcatcccccaccagatccacctgggcgagctgcacgccatcctgcggcggcaggaggacttctaccccttcctgaaggacaaccgggagaagatcgagaagatcctgaccttccggatcccctactacgtgggccccctggcccggggcaacagccggttcgcctggatgacccggaagagcgaggagaccatcaccccctggaacttcgaggaggtggtggacaagggcgccagcgcccagagcttcatcgagcggatgaccaacttcgacaagaacctgcccaacgagaaggtgctgcccaagcacagcctgctgtacgagtacttcaccgtgtacaacgagctgaccaaggtgaagtacgtgaccgagggcatgcggaagcccgccttcctgagcggcgagcagaagaaggccatcgtggacctgctgttcaagaccaaccggaaggtgaccgtgaagcagctgaaggaggactacttcaagaagatcgagtgcttcgacagcgtggagatcagcggcgtggaggaccggttcaacgccagcctgggcacctaccacgacctgctgaagatcatcaaggacaaggacttcctggacaacgaggagaacgaggacatcctggaggacatcgtgctgaccctgaccctgttcgaggaccgggagatgatcgaggagcggctgaagacctacgcccacctgttcgacgacaaggtgatgaagcagctgaagcggcggcggtacaccggctggggccggctgagccggaagctgatcaacggcatccgggacaagcagagcggcaagaccatcctggacttcctgaagagcgacggcttcgccaaccggaacttcatgcagctgatccacgacgacagcctgaccttcaaggaggacatccagaaggcccaggtgagcggccagggcgacagcctgcacgagcacatcgccaacctggccggcagccccgccatcaagaagggcatcctgcagaccgtgaaggtggtggacgagctggtgaaggtgatgggccggcacaagcccgagaacatcgtgatcgagatggcccgggagaaccagaccacccagaagggccagaagaacagccgggagcggatgaagcggatcgaggagggcatcaaggagctgggcagccagatcctgaaggagcaccccgtggagaacacccagctgcagaacgagaagctgtacctgtactacctgcagaacggccgggacatgtacgtggaccaggagctggacatcaaccggctgagcgactacgacgtggaccacatcgtgccccagagcttcctgaaggacgacagcatcgacaacaaggtgctgacccggagcgacaagaaccggggcaagagcgacaacgtgcccagcgaggaggtggtgaagaagatgaagaactactggcggcagctgctgaacgccaagctgatcacccagcggaagttcgacaacctgaccaaggccgagcggggcggcctgagcgagctggacaaggccggcttcatcaagcggcagctggtggagacccggcagatcaccaagcacgtggcccagatcctggacagccggatgaacaccaagtacgacgagaacgacaagctgatccgggaggtgaaggtgatcaccctgaagagcaagctggtgagcgacttccggaaggacttccagttctacaaggtgcgggagatcaacaactaccaccacgcccacgacgcctacctgaacgccgtggtgggcaccgccctgatcaagaagtaccccaagctggagagcgagttcgtgtacggcgactacaaggtgtacgacgtgcggaagatgatcgccaagagcgagcaggagatcggcaaggccaccgccaagtacttcttctacagcaacatcatgaacttcttcaagaccgagatcaccctggccaacggcgagatccggaagcggcccctgatcgagaccaacggcgagaccggcgagatcgtgtgggacaagggccgggacttcgccaccgtgcggaaggtgctgagcatgccccaggtgaacatcgtgaagaagaccgaggtgcagaccggcggcttcagcaaggagagcatcctgcccaagcggaacagcgacaagctgatcgcccggaagaaggactgggaccccaagaagtacggcggcttcgacagccccaccgtggcctacagcgtgctggtggtggccaaggtggagaagggcaagagcaagaagctgaagagcgtgaaggagctgctgggcatcaccatcatggagcggagcagcttcgagaagaaccccatcgacttcctggaggccaagggctacaaggaggtgaagaaggacctgatcatcaagctgcccaagtacagcctgttcgagctggagaacggccggaagcggatgctggccagcgccggcgagctgcagaagggcaacgagctggccctgcccagcaagtacgtgaacttcctgtacctggccagccactacgagaagctgaagggcagccccgaggacaacgagcagaagcagctgttcgtggagcagcacaagcactacctggacgagatcatcgagcagatcagcgagttcagcaagcgggtgatcctggccgacgccaacctggacaaggtgctgagcgcctacaacaagcaccgggacaagcccatccgggagcaggccgagaacatcatccacctgttcaccctgaccaacctgggcgcccccgccgccttcaagtacttcgacaccaccatcgaccggaagcggtacaccagcaccaaggaggtgctggacgccaccctgatccaccagagcatcaccggcctgtacgagacccggatcgacctgagccagctgggcggcgactga

SEQ ID NO: 516-599 - skipped (84 entries)

SEQ ID NO: 600 - protein, 7 aa, synthetic construct
  REGION 1..7: note = Synthetic
PKKKRKV

SEQ ID NO: 601 - protein, 7 aa, synthetic construct
  REGION 1..7: note = Synthetic
PKKKRRV

SEQ ID NO: 602 - protein, 16 aa, synthetic construct
  REGION 1..16: note = Synthetic
KRPAATKKAGQAKKKK

SEQ ID NO: 603-1000 - skipped (398 entries)

SEQ ID NO: 1001 - RNA, 100 nt, synthetic construct
  misc_feature 1..100: note = Synthetic
  source 1..100: mol_type = other RNA
acatagacctaccttaatcagttttagagctagaaatagcaagttaaaataaggctagtccgttatcaacttgaaaaagtggcaccgagtcggtgctttt

SEQ ID NO: 1002-1004 - skipped (3 entries)

SEQ ID NO: 1005 - RNA, 100 nt, synthetic construct
  misc_feature 1..100: note = Synthetic
  source 1..100: mol_type = other RNA
cctatcatacagtgcttatggttttagagctagaaatagcaagttaaaataaggctagtccgttatcaacttgaaaaagtggcaccgagtcggtgctttt

SEQ ID NO: 1006 - skipped

SEQ ID NO: 1007 - RNA, 100 nt, synthetic construct
  misc_feature 1..100: note = Synthetic
  source 1..100: mol_type = other RNA
tagacctaccttaatcatgggttttagagctagaaatagcaagttaaaataaggctagtccgttatcaacttgaaaaagtggcaccgagtcggtgctttt

SEQ ID NO: 1008 - RNA, 100 nt, synthetic construct
  misc_feature 1..100: note = Synthetic
  source 1..100: mol_type = other RNA
tacagagagtccaatagcccgttttagagctagaaatagcaagttaaaataaggctagtccgttatcaacttgaaaaagtggcaccgagtcggtgctttt

SEQ ID NO: 1009-1013 - skipped (5 entries)

SEQ ID NO: 1014 - RNA, 99 nt, synthetic construct
  misc_feature 1..99: note = Synthetic
  source 1..99: mol_type = other RNA
tacactttgggggatccaaattttagagctagaaatagcaagttaaaataaggctagtccgttatcaacttgaaaaagtggcaccgagtcggtgctttt

SEQ ID NO: 1015-1022 - skipped (8 entries)

SEQ ID NO: 1023 - RNA, 100 nt, synthetic construct
  misc_feature 1..100: note = Synthetic
  source 1..100: mol_type = other RNA
tatttcttttagtgcctgtagttttagagctagaaatagcaagttaaaataaggctagtccgttatcaacttgaaaaagtggcaccgagtcggtgctttt

SEQ ID NO: 1024-1026 - skipped (3 entries)

SEQ ID NO: 1027 - RNA, 99 nt, synthetic construct
  misc_feature 1..99: note = Synthetic
  source 1..99: mol_type = other RNA
ctttatcagtccctaaatctttttagagctagaaatagcaagttaaaataaggctagtccgttatcaacttgaaaaagtggcaccgagtcggtgctttt

SEQ ID NO: 1028-1031 - skipped (4 entries)

SEQ ID NO: 1032 - RNA, 99 nt, synthetic construct
  misc_feature 1..99: note = Synthetic
  source 1..99: mol_type = other RNA
tttagggactgataaagatattttagagctagaaatagcaagttaaaataaggctagtccgttatcaacttgaaaaagtggcaccgagtcggtgctttt

SEQ ID NO: 1033-1044 - skipped (12 entries)

SEQ ID NO: 1045 - RNA, 99 nt, synthetic construct
  misc_feature 1..99: note = Synthetic
  source 1..99: mol_type = other RNA
ccttaatcatggtggaaactttttagagctagaaatagcaagttaaaataaggctagtccgttatcaacttgaaaaagtggcaccgagtcggtgctttt

SEQ ID NO: 1046-1047 - skipped (2 entries)

SEQ ID NO: 1048 - RNA, 100 nt, synthetic construct
  misc_feature 1..100: note = Synthetic
  source 1..100: mol_type = other RNA
gaaggtgactctgacttctggttttagagctagaaatagcaagttaaaataaggctagtccgttatcaacttgaaaaagtggcaccgagtcggtgctttt

SEQ ID NO: 1049-1062 - skipped (14 entries)

SEQ ID NO: 1063 - RNA, 100 nt, synthetic construct
  misc_feature 1..100: note = Synthetic
  source 1..100: mol_type = other RNA
cggtttattaaccccaagtggttttagagctagaaatagcaagttaaaataaggctagtccgttatcaacttgaaaaagtggcaccgagtcggtgctttt

SEQ ID NO: 1064-1066 - skipped (3 entries)

SEQ ID NO: 1067 - RNA, 100 nt, synthetic construct
  misc_feature 1..100: note = Synthetic
  source 1..100: mol_type = other RNA
accgcgatgggtgagccctcgttttagagctagaaatagcaagttaaaataaggctagtccgttatcaacttgaaaaagtggcaccgagtcggtgctttt

SEQ ID NO: 1068 - skipped

SEQ ID NO: 1069 - RNA, 100 nt, synthetic construct
  misc_feature 1..100: note = Synthetic
  source 1..100: mol_type = other RNA
accgcacgcttcagtgccttgttttagagctagaaatagcaagttaaaataaggctagtccgttatcaacttgaaaaagtggcaccgagtcggtgctttt

SEQ ID NO: 1070 - skipped

SEQ ID NO: 1071 - RNA, 100 nt, synthetic construct
  misc_feature 1..100: note = Synthetic
  source 1..100: mol_type = other RNA
gtgtaagtatagcctcctgagttttagagctagaaatagcaagttaaaataaggctagtccgttatcaacttgaaaaagtggcaccgagtcggtgctttt

SEQ ID NO: 1072-1073 - skipped (2 entries)

SEQ ID NO: 1074 - RNA, 100 nt, synthetic construct
  misc_feature 1..100: note = Synthetic
  source 1..100: mol_type = other RNA
ggaaaggccagccccacttggttttagagctagaaatagcaagttaaaataaggctagtccgttatcaacttgaaaaagtggcaccgagtcggtgctttt

SEQ ID NO: 1075 - skipped

SEQ ID NO: 1076 - RNA, 100 nt, synthetic construct
  misc_feature 1..100: note = Synthetic
  source 1..100: mol_type = other RNA
tgccacaaagctcgagcccagttttagagctagaaatagcaagttaaaataaggctagtccgttatcaacttgaaaaagtggcaccgagtcggtgctttt

SEQ ID NO: 1077 - RNA, 100 nt, synthetic construct
  misc_feature 1..100: note = Synthetic
  source 1..100: mol_type = other RNA
ggtgtaagtatagcctcctggttttagagctagaaatagcaagttaaaataaggctagtccgttatcaacttgaaaaagtggcaccgagtcggtgctttt

SEQ ID NO: 1078 - RNA, 99 nt, synthetic construct
  misc_feature 1..99: note = Synthetic
  source 1..99: mol_type = other RNA
tcctgagggctcacccatcgttttagagctagaaatagcaagttaaaataaggctagtccgttatcaacttgaaaaagtggcaccgagtcggtgctttt

SEQ ID NO: 1079 - RNA, 100 nt, synthetic construct
  misc_feature 1..100: note = Synthetic
  source 1..100: mol_type = other RNA
aggaaaggccagccccacttgttttagagctagaaatagcaagttaaaataaggctagtccgttatcaacttgaaaaagtggcaccgagtcggtgctttt

SEQ ID NO: 1080 - skipped

SEQ ID NO: 1081 - RNA, 100 nt, synthetic construct
  misc_feature 1..100: note = Synthetic
  source 1..100: mol_type = other RNA
gaggaaaggccagccccactgttttagagctagaaatagcaagttaaaataaggctagtccgttatcaacttgaaaaagtggcaccgagtcggtgctttt

SEQ ID NO: 1082-2000 - skipped (919 entries)

SEQ ID NO: 2001 - RNA, 100 nt, synthetic construct; identical to SEQ ID NO: 1001
  misc_feature 1..100: note = Synthetic
  modified_base 1: mod_base = OTHER; note = 2'-O-methyl nucleotide, phosphorothioate linkage
  modified_base 2: mod_base = OTHER; note = 2'-O-methyl nucleotide, phosphorothioate linkage
  modified_base 3: mod_base = OTHER; note = 2'-O-methyl nucleotide, phosphorothioate linkage
  modified_base 29: mod_base = OTHER; note = 2'-O-methyl nucleotide
  modified_base 30: mod_base = OTHER; note = 2'-O-methyl nucleotide
  modified_base 31: mod_base = OTHER; note = 2'-O-methyl nucleotide
  modified_base 32: mod_base = OTHER; note = 2'-O-methyl nucleotide
  modified_base 33: mod_base = OTHER; note = 2'-O-methyl nucleotide
  modified_base 34: mod_base = OTHER; note = 2'-O-methyl nucleotide
  modified_base 35: mod_base = OTHER; note = 2'-O-methyl nucleotide
  modified_base 36: mod_base = OTHER; note = 2'-O-methyl nucleotide
  modified_base 37: mod_base = OTHER; note = 2'-O-methyl nucleotide
  modified_base 38: mod_base = OTHER; note = 2'-O-methyl nucleotide
  modified_base 39: mod_base = OTHER; note = 2'-O-methyl nucleotide
  modified_base 40: mod_base = OTHER; note = 2'-O-methyl nucleotide
  modified_base 69: mod_base = OTHER; note = 2'-O-methyl nucleotide
  modified_base 70: mod_base = OTHER; note = 2'-O-methyl nucleotide
  modified_base 71: mod_base = OTHER; note = 2'-O-methyl nucleotide
  modified_base 72: mod_base = OTHER; note = 2'-O-methyl nucleotide
  modified_base 73: mod_base = OTHER; note = 2'-O-methyl nucleotide
  modified_base 74: mod_base = OTHER; note = 2'-O-methyl nucleotide
  modified_base 75: mod_base = OTHER; note = 2'-O-methyl nucleotide
  modified_base 76: mod_base = OTHER; note = 2'-O-methyl nucleotide
  modified_base 77: mod_base = OTHER; note = 2'-O-methyl nucleotide
  modified_base 78: mod_base = OTHER; note = 2'-O-methyl nucleotide
  modified_base 79: mod_base = OTHER; note = 2'-O-methyl nucleotide
  modified_base 80: mod_base = OTHER; note = 2'-O-methyl nucleotide
  modified_base 81: mod_base = OTHER; note = 2'-O-methyl nucleotide
  modified_base 82: mod_base = OTHER; note = 2'-O-methyl nucleotide
  modified_base 83: mod_base = OTHER; note = 2'-O-methyl nucleotide
  modified_base 84: mod_base = OTHER; note = 2'-O-methyl nucleotide
  modified_base 85: mod_base = OTHER; note = 2'-O-methyl nucleotide
  modified_base 86: mod_base = OTHER; note = 2'-O-methyl nucleotide
  modified_base 87: mod_base = OTHER; note = 2'-O-methyl nucleotide
  modified_base 88: mod_base = OTHER; note = 2'-O-methyl nucleotide
  modified_base 89: mod_base = OTHER; note = 2'-O-methyl nucleotide
  modified_base 90: mod_base = OTHER; note = 2'-O-methyl nucleotide
  modified_base 91: mod_base = OTHER; note = 2'-O-methyl nucleotide
  modified_base 92: mod_base = OTHER; note = 2'-O-methyl nucleotide
  modified_base 93: mod_base = OTHER; note = 2'-O-methyl nucleotide
  modified_base 94: mod_base = OTHER; note = 2'-O-methyl nucleotide
  modified_base 95: mod_base = OTHER; note = 2'-O-methyl nucleotide
  modified_base 96: mod_base = OTHER; note = 2'-O-methyl nucleotide
  modified_base 97: mod_base = OTHER; note = 2'-O-methyl nucleotide, phosphorothioate linkage
  modified_base 98: mod_base = OTHER; note = 2'-O-methyl nucleotide, phosphorothioate linkage
  modified_base 99: mod_base = OTHER; note = 2'-O-methyl nucleotide, phosphorothioate linkage
  modified_base 100: mod_base = OTHER; note = 2'-O-methyl nucleotide
  source 1..100: mol_type = other RNA

SEQ ID NO: 2002-2004 - skipped (3 entries)

SEQ ID NO: 2005 - RNA, 100 nt, synthetic construct; identical to SEQ ID NO: 1005
  misc_feature 1..100: note = Synthetic
  modified_base 1: mod_base = OTHER; note = 2'-O-methyl nucleotide, phosphorothioate linkage
  modified_base 2: mod_base = OTHER; note = 2'-O-methyl nucleotide, phosphorothioate linkage
  modified_base 3: mod_base = OTHER; note = 2'-O-methyl nucleotide, phosphorothioate linkage
  modified_base 29: mod_base = OTHER; note = 2'-O-methyl nucleotide
  modified_base 30: mod_base = OTHER; note = 2'-O-methyl nucleotide
  modified_base 31: mod_base = OTHER; note = 2'-O-methyl nucleotide
  modified_base 32: mod_base = OTHER; note = 2'-O-methyl nucleotide
  modified_base 33: mod_base = OTHER; note = 2'-O-methyl nucleotide
  modified_base 34: mod_base = OTHER; note = 2'-O-methyl nucleotide
  modified_base 35: mod_base = OTHER; note = 2'-O-methyl nucleotide
  modified_base 36: mod_base = OTHER; note = 2'-O-methyl nucleotide
  modified_base 37: mod_base = OTHER; note = 2'-O-methyl nucleotide
  modified_base 38: mod_base = OTHER; note = 2'-O-methyl nucleotide
  modified_base 39: mod_base = OTHER; note = 2'-O-methyl nucleotide
  modified_base 40: mod_base = OTHER; note = 2'-O-methyl nucleotide
  modified_base 69: mod_base = OTHER; note = 2'-O-methyl nucleotide
  modified_base 70: mod_base = OTHER; note = 2'-O-methyl nucleotide
  modified_base 71: mod_base = OTHER; note = 2'-O-methyl nucleotide
  modified_base 72: mod_base = OTHER; note = 2'-O-methyl nucleotide
  modified_base 73: mod_base = OTHER; note = 2'-O-methyl nucleotide
  modified_base 74: mod_base = OTHER; note = 2'-O-methyl nucleotide
  modified_base 75: mod_base = OTHER; note = 2'-O-methyl nucleotide
  modified_base 76: mod_base = OTHER; note = 2'-O-methyl nucleotide
  modified_base 77: mod_base = OTHER; note = 2'-O-methyl nucleotide
  modified_base 78: mod_base = OTHER; note = 2'-O-methyl nucleotide
  modified_base 79: mod_base = OTHER; note = 2'-O-methyl nucleotide
  modified_base 80: mod_base = OTHER; note = 2'-O-methyl nucleotide
  modified_base 81: mod_base = OTHER; note = 2'-O-methyl nucleotide
  modified_base 82: mod_base = OTHER; note = 2'-O-methyl nucleotide
  modified_base 83: mod_base = OTHER; note = 2'-O-methyl nucleotide
  modified_base 84: mod_base = OTHER; note = 2'-O-methyl nucleotide
  modified_base 85: mod_base = OTHER; note = 2'-O-methyl nucleotide
  modified_base 86: mod_base = OTHER; note = 2'-O-methyl nucleotide
  modified_base 87: mod_base = OTHER; note = 2'-O-methyl nucleotide
  modified_base 88: mod_base = OTHER; note = 2'-O-methyl nucleotide
  modified_base 89: mod_base = OTHER; note = 2'-O-methyl nucleotide
  modified_base 90: mod_base = OTHER; note = 2'-O-methyl nucleotide
  modified_base 91: mod_base = OTHER; note = 2'-O-methyl nucleotide
  modified_base 92: mod_base = OTHER; note = 2'-O-methyl nucleotide
  modified_base 93: mod_base = OTHER; note = 2'-O-methyl nucleotide
  modified_base 94: mod_base = OTHER; note = 2'-O-methyl nucleotide
  modified_base 95: mod_base = OTHER; note = 2'-O-methyl nucleotide
  modified_base 96: mod_base = OTHER; note = 2'-O-methyl nucleotide
  modified_base 97: mod_base = OTHER; note = 2'-O-methyl nucleotide, phosphorothioate linkage
  modified_base 98: mod_base = OTHER; note = 2'-O-methyl nucleotide, phosphorothioate linkage
  modified_base 99: mod_base = OTHER; note = 2'-O-methyl nucleotide, phosphorothioate linkage
  modified_base 100: mod_base = OTHER; note = 2'-O-methyl nucleotide
  source 1..100: mol_type = other RNA

SEQ ID NO: 2006 - skipped

SEQ ID NO: 2007 - RNA, 100 nt, synthetic construct; identical to SEQ ID NO: 1007
  misc_feature 1..100: note = Synthetic
  modified_base 1: mod_base = OTHER; note = 2'-O-methyl nucleotide, phosphorothioate linkage
  modified_base 2: mod_base = OTHER; note = 2'-O-methyl nucleotide, phosphorothioate linkage
  modified_base 3: mod_base = OTHER; note = 2'-O-methyl nucleotide, phosphorothioate linkage
  modified_base 29: mod_base = OTHER; note = 2'-O-methyl nucleotide
  modified_base 30: mod_base = OTHER; note = 2'-O-methyl nucleotide
  modified_base 31: mod_base = OTHER; note = 2'-O-methyl nucleotide
  modified_base 32: mod_base = OTHER; note = 2'-O-methyl nucleotide
  modified_base 33: mod_base = OTHER; note = 2'-O-methyl nucleotide
  modified_base 34: mod_base = OTHER; note = 2'-O-methyl nucleotide
  modified_base 35: mod_base = OTHER; note = 2'-O-methyl nucleotide
  modified_base 36: mod_base = OTHER; note = 2'-O-methyl nucleotide
  modified_base 37: mod_base = OTHER; note = 2'-O-methyl nucleotide
  modified_base 38: mod_base = OTHER; note = 2'-O-methyl nucleotide
  modified_base 39: mod_base = OTHER; note = 2'-O-methyl nucleotide
  modified_base 40: mod_base = OTHER; note = 2'-O-methyl nucleotide
  modified_base 69: mod_base = OTHER; note = 2'-O-methyl nucleotide
  modified_base 70: mod_base = OTHER; note = 2'-O-methyl nucleotide
  modified_base 71: mod_base = OTHER; note = 2'-O-methyl nucleotide
  modified_base 72: mod_base = OTHER; note = 2'-O-methyl nucleotide
  modified_base 73: mod_base = OTHER; note = 2'-O-methyl nucleotide
  modified_base 74: mod_base = OTHER; note = 2'-O-methyl nucleotide
  modified_base 75: mod_base = OTHER; note = 2'-O-methyl nucleotide
  modified_base 76: mod_base = OTHER; note = 2'-O-methyl nucleotide
  modified_base 77: mod_base = OTHER; note = 2'-O-methyl nucleotide
  modified_base 78: mod_base = OTHER; note = 2'-O-methyl nucleotide
  modified_base 79: mod_base = OTHER; note = 2'-O-methyl nucleotide
  modified_base 80: mod_base = OTHER; note = 2'-O-methyl nucleotide
  modified_base 81: mod_base = OTHER; note = 2'-O-methyl nucleotide
  modified_base 82: mod_base = OTHER; note = 2'-O-methyl nucleotide
  modified_base 83: mod_base = OTHER; note = 2'-O-methyl nucleotide
  modified_base 84: mod_base = OTHER; note = 2'-O-methyl nucleotide
  modified_base 85: mod_base = OTHER; note = 2'-O-methyl nucleotide
  modified_base 86: mod_base = OTHER; note = 2'-O-methyl nucleotide
  modified_base 87: mod_base = OTHER; note = 2'-O-methyl nucleotide
  modified_base 88: mod_base = OTHER; note = 2'-O-methyl nucleotide
  modified_base 89: mod_base = OTHER; note = 2'-O-methyl nucleotide
  modified_base 90: mod_base = OTHER; note = 2'-O-methyl nucleotide
  modified_base 91: mod_base = OTHER; note = 2'-O-methyl nucleotide
  modified_base 92: mod_base = OTHER; note = 2'-O-methyl nucleotide
  modified_base 93: mod_base = OTHER; note = 2'-O-methyl nucleotide
  modified_base 94: mod_base = OTHER; note = 2'-O-methyl nucleotide
  modified_base 95: mod_base = OTHER; note = 2'-O-methyl nucleotide
  modified_base 96: mod_base = OTHER; note = 2'-O-methyl nucleotide
  modified_base 97: mod_base = OTHER; note = 2'-O-methyl nucleotide, phosphorothioate linkage
  modified_base 98: mod_base = OTHER; note = 2'-O-methyl nucleotide, phosphorothioate linkage
  modified_base 99: mod_base = OTHER; note = 2'-O-methyl nucleotide, phosphorothioate linkage
  modified_base 100: mod_base = OTHER; note = 2'-O-methyl nucleotide
  source 1..100: mol_type = other RNA

SEQ ID NO: 2008 - RNA, 100 nt, synthetic construct; identical to SEQ ID NO: 1008
  misc_feature 1..100: note = Synthetic
  modified_base 1: mod_base = OTHER; note = 2'-O-methyl nucleotide, phosphorothioate linkage
  modified_base 2: mod_base = OTHER; note = 2'-O-methyl nucleotide, phosphorothioate linkage
  modified_base 3: mod_base = OTHER; note = 2'-O-methyl nucleotide, phosphorothioate linkage
  modified_base 29: mod_base = OTHER; note = 2'-O-methyl nucleotide
  modified_base 30: mod_base = OTHER; note = 2'-O-methyl nucleotide
  modified_base 31: mod_base = OTHER; note = 2'-O-methyl nucleotide
  modified_base 32: mod_base = OTHER; note = 2'-O-methyl nucleotide
  modified_base 33: mod_base = OTHER; note = 2'-O-methyl nucleotide
  modified_base 34: mod_base = OTHER; note = 2'-O-methyl nucleotide
  modified_base 35: mod_base = OTHER; note = 2'-O-methyl nucleotide
  modified_base 36: mod_base = OTHER; note = 2'-O-methyl nucleotide
  modified_base 37: mod_base = OTHER; note = 2'-O-methyl nucleotide
  modified_base 38: mod_base = OTHER; note = 2'-O-methyl nucleotide
  modified_base 39: mod_base = OTHER; note = 2'-O-methyl nucleotide
  modified_base 40: mod_base = OTHER; note = 2'-O-methyl nucleotide
  modified_base 69: mod_base = OTHER; note = 2'-O-methyl nucleotide
  modified_base 70: mod_base = OTHER; note = 2'-O-methyl nucleotide
  modified_base 71: mod_base = OTHER; note = 2'-O-methyl nucleotide
  modified_base 72: mod_base = OTHER; note = 2'-O-methyl nucleotide
  modified_base 73: mod_base = OTHER; note = 2'-O-methyl nucleotide
  modified_base 74: mod_base = OTHER; note = 2'-O-methyl nucleotide
  modified_base 75: mod_base = OTHER; note = 2'-O-methyl nucleotide
  modified_base 76: mod_base = OTHER; note = 2'-O-methyl nucleotide
  modified_base 77: mod_base = OTHER; note = 2'-O-methyl nucleotide
  modified_base 78: mod_base = OTHER; note = 2'-O-methyl nucleotide
  modified_base 79: mod_base = OTHER; note = 2'-O-methyl nucleotide
  modified_base 80: mod_base = OTHER; note = 2'-O-methyl nucleotide
  modified_base 81: mod_base = OTHER; note = 2'-O-methyl nucleotide
  modified_base 82: mod_base = OTHER; note = 2'-O-methyl nucleotide
  modified_base 83: mod_base = OTHER; note = 2'-O-methyl nucleotide
  modified_base 84: mod_base = OTHER; note = 2'-O-methyl nucleotide
  modified_base 85: mod_base = OTHER; note = 2'-O-methyl nucleotide
  modified_base 86: mod_base = OTHER; note = 2'-O-methyl nucleotide
  modified_base 87: mod_base = OTHER; note = 2'-O-methyl nucleotide
  modified_base 88: mod_base = OTHER; note = 2'-O-methyl nucleotide
  modified_base 89: mod_base = OTHER; note = 2'-O-methyl nucleotide
  modified_base 90: mod_base = OTHER; note = 2'-O-methyl nucleotide
  modified_base 91: mod_base = OTHER; note = 2'-O-methyl nucleotide
  modified_base 92: mod_base = OTHER; note = 2'-O-methyl nucleotide
  modified_base 93: mod_base = OTHER; note = 2'-O-methyl nucleotide
  modified_base 94: mod_base = OTHER; note = 2'-O-methyl nucleotide
  modified_base 95: mod_base = OTHER; note = 2'-O-methyl nucleotide
  modified_base 96: mod_base = OTHER; note = 2'-O-methyl nucleotide
  modified_base 97: mod_base = OTHER; note = 2'-O-methyl nucleotide, phosphorothioate linkage
  modified_base 98: mod_base = OTHER; note = 2'-O-methyl nucleotide, phosphorothioate linkage
  modified_base 99: mod_base = OTHER; note = 2'-O-methyl nucleotide, phosphorothioate linkage
  modified_base 100: mod_base = OTHER; note = 2'-O-methyl nucleotide
  source 1..100: mol_type = other RNA

SEQ ID NO: 2009-2013 - skipped (5 entries)

SEQ ID NO: 2014 - RNA, 100 nt, synthetic construct
  misc_feature 1..100: note = Synthetic
  modified_base 1: mod_base = OTHER; note = 2'-O-methyl nucleotide, phosphorothioate linkage
  modified_base 2: mod_base = OTHER; note = 2'-O-methyl nucleotide, phosphorothioate linkage
  modified_base 3: mod_base = OTHER; note = 2'-O-methyl nucleotide, phosphorothioate linkage
  modified_base 29: mod_base = OTHER; note = 2'-O-methyl nucleotide
  modified_base 30: mod_base = OTHER; note = 2'-O-methyl nucleotide
  modified_base 31: mod_base = OTHER; note = 2'-O-methyl nucleotide
  modified_base 32: mod_base = OTHER; note = 2'-O-methyl nucleotide
  modified_base 33: mod_base = OTHER; note = 2'-O-methyl nucleotide
  modified_base 34: mod_base = OTHER; note = 2'-O-methyl nucleotide
  modified_base 35: mod_base = OTHER; note = 2'-O-methyl nucleotide
  modified_base 36: mod_base = OTHER; note = 2'-O-methyl nucleotide
  modified_base 37: mod_base = OTHER; note = 2'-O-methyl nucleotide
  modified_base 38: mod_base = OTHER; note = 2'-O-methyl nucleotide
  modified_base 39: mod_base = OTHER; note = 2'-O-methyl nucleotide
  modified_base 40: mod_base = OTHER; note = 2'-O-methyl nucleotide
  modified_base 69: mod_base = OTHER; note = 2'-O-methyl nucleotide
  modified_base 70: mod_base = OTHER; note = 2'-O-methyl nucleotide
  modified_base 71: mod_base = OTHER; note = 2'-O-methyl nucleotide
  modified_base 72: mod_base = OTHER; note = 2'-O-methyl nucleotide
  modified_base 73: mod_base = OTHER; note = 2'-O-methyl nucleotide
  modified_base 74: mod_base = OTHER; note = 2'-O-methyl nucleotide
  modified_base 75: mod_base = OTHER; note = 2'-O-methyl nucleotide
  modified_base 76: mod_base = OTHER; note = 2'-O-methyl nucleotide
  modified_base 77: mod_base = OTHER; note = 2'-O-methyl nucleotide
  modified_base 78: mod_base = OTHER; note = 2'-O-methyl nucleotide
  modified_base 79: mod_base = OTHER; note = 2'-O-methyl nucleotide
  modified_base 80: mod_base = OTHER; note = 2'-O-methyl nucleotide
  modified_base 81: mod_base = OTHER; note = 2'-O-methyl nucleotide
  modified_base 82: mod_base = OTHER; note = 2'-O-methyl nucleotide
  modified_base 83: mod_base = OTHER; note = 2'-O-methyl nucleotide
  modified_base 84: mod_base = OTHER; note = 2'-O-methyl nucleotide
  modified_base 85: mod_base = OTHER; note = 2'-O-methyl nucleotide
  modified_base 86: mod_base = OTHER; note = 2'-O-methyl nucleotide
  modified_base 87: mod_base = OTHER; note = 2'-O-methyl nucleotide
  modified_base 88: mod_base = OTHER; note = 2'-O-methyl nucleotide
  modified_base 89: mod_base = OTHER; note = 2'-O-methyl nucleotide
  modified_base 90: mod_base = OTHER; note = 2'-O-methyl nucleotide
  modified_base 91: mod_base = OTHER; note = 2'-O-methyl nucleotide
  modified_base 92: mod_base = OTHER; note = 2'-O-methyl nucleotide
  modified_base 93: mod_base = OTHER; note = 2'-O-methyl nucleotide
  modified_base 94: mod_base = OTHER; note = 2'-O-methyl nucleotide
  modified_base 95: mod_base = OTHER; note = 2'-O-methyl nucleotide
  modified_base 96: mod_base = OTHER; note = 2'-O-methyl nucleotide
  modified_base 97: mod_base = OTHER; note = 2'-O-methyl nucleotide, phosphorothioate linkage
  modified_base 98: mod_base = OTHER; note = 2'-O-methyl nucleotide, phosphorothioate linkage
  modified_base 99: mod_base = OTHER; note = 2'-O-methyl nucleotide, phosphorothioate linkage
  modified_base 100: mod_base = OTHER; note = 2'-O-methyl nucleotide
  source 1..100: mol_type = other RNA
tacactttgggggatccaaagttttagagctagaaatagcaagttaaaataaggctagtccgttatcaacttgaaaaagtggcaccgagtcggtgctttt

SEQ ID NO: 2015-2022 - skipped (8 entries)

SEQ ID NO: 2023 - RNA, 100 nt, synthetic construct; identical to SEQ ID NO: 1023
  misc_feature 1..100: note = Synthetic
  modified_base 1: mod_base = OTHER; note = 2'-O-methyl nucleotide, phosphorothioate linkage
  modified_base 2: mod_base = OTHER; note = 2'-O-methyl nucleotide, phosphorothioate linkage
  modified_base 3: mod_base = OTHER; note = 2'-O-methyl nucleotide, phosphorothioate linkage
  modified_base 29: mod_base = OTHER; note = 2'-O-methyl nucleotide
  modified_base 30: mod_base = OTHER; note = 2'-O-methyl nucleotide
  modified_base 31: mod_base = OTHER; note = 2'-O-methyl nucleotide
  modified_base 32: mod_base = OTHER; note = 2'-O-methyl nucleotide
  modified_base 33: mod_base = OTHER; note = 2'-O-methyl nucleotide
  modified_base 34: mod_base = OTHER; note = 2'-O-methyl nucleotide
  modified_base 35: mod_base = OTHER; note = 2'-O-methyl nucleotide
  modified_base 36: mod_base = OTHER; note = 2'-O-methyl nucleotide
  modified_base 37: mod_base = OTHER; note = 2'-O-methyl nucleotide
  modified_base 38: mod_base = OTHER; note = 2'-O-methyl nucleotide
  modified_base 39: mod_base = OTHER; note = 2'-O-methyl nucleotide
  modified_base 40: mod_base = OTHER; note = 2'-O-methyl nucleotide
  modified_base 69: mod_base = OTHER; note = 2'-O-methyl nucleotide
  modified_base 70: mod_base = OTHER; note = 2'-O-methyl nucleotide
  modified_base 71: mod_base = OTHER; note = 2'-O-methyl nucleotide
  modified_base 72: mod_base = OTHER; note = 2'-O-methyl nucleotide
  modified_base 73: mod_base = OTHER; note = 2'-O-methyl nucleotide
  modified_base 74: mod_base = OTHER; note = 2'-O-methyl nucleotide
  modified_base 75: mod_base = OTHER; note = 2'-O-methyl nucleotide
  modified_base 76: mod_base = OTHER; note = 2'-O-methyl nucleotide
  modified_base 77: mod_base = OTHER; note = 2'-O-methyl nucleotide
  modified_base 78: mod_base = OTHER; note = 2'-O-methyl nucleotide
  modified_base 79: mod_base = OTHER; note = 2'-O-methyl nucleotide
  modified_base 80: mod_base = OTHER; note = 2'-O-methyl nucleotide
  modified_base 81: mod_base = OTHER; note = 2'-O-methyl nucleotide
  modified_base 82: mod_base = OTHER; note = 2'-O-methyl nucleotide
  modified_base 83: mod_base = OTHER; note = 2'-O-methyl nucleotide
  modified_base 84: mod_base = OTHER; note = 2'-O-methyl nucleotide
  modified_base 85: mod_base = OTHER; note = 2'-O-methyl nucleotide
  modified_base 86: mod_base = OTHER; note = 2'-O-methyl nucleotide
  modified_base 87: mod_base = OTHER; note = 2'-O-methyl nucleotide
  modified_base 88: mod_base = OTHER; note = 2'-O-methyl nucleotide
  modified_base 89: mod_base = OTHER; note = 2'-O-methyl nucleotide
  modified_base 90: mod_base = OTHER; note = 2'-O-methyl nucleotide
  modified_base 91: mod_base = OTHER; note = 2'-O-methyl nucleotide
  modified_base 92: mod_base = OTHER; note = 2'-O-methyl nucleotide
  modified_base 93: mod_base = OTHER; note = 2'-O-methyl nucleotide
  modified_base 94: mod_base = OTHER; note = 2'-O-methyl nucleotide
  modified_base 95: mod_base = OTHER; note = 2'-O-methyl nucleotide
  modified_base 96: mod_base = OTHER; note = 2'-O-methyl nucleotide
  modified_base 97: mod_base = OTHER; note = 2'-O-methyl nucleotide, phosphorothioate linkage
  modified_base 98: mod_base = OTHER; note = 2'-O-methyl nucleotide, phosphorothioate linkage
  modified_base 99: mod_base = OTHER; note = 2'-O-methyl nucleotide, phosphorothioate linkage
  modified_base 100: mod_base = OTHER; note = 2'-O-methyl nucleotide
  source 1..100: mol_type = other RNA

SEQ ID NO: 2024-2026 - skipped (3 entries)

SEQ ID NO: 2027 - RNA, 102 nt, synthetic construct
  misc_feature 1..102: note = Synthetic
  modified_base 1: mod_base = OTHER; note = 2'-O-methyl nucleotide, phosphorothioate linkage
  modified_base 2: mod_base = OTHER; note = 2'-O-methyl nucleotide, phosphorothioate linkage
  modified_base 3: mod_base = OTHER; note = 2'-O-methyl nucleotide, phosphorothioate linkage
  modified_base 31: mod_base = OTHER; note = 2'-O-methyl nucleotide
  modified_base 32: mod_base = OTHER; note = 2'-O-methyl nucleotide
  modified_base 33: mod_base = OTHER; note = 2'-O-methyl nucleotide
  modified_base 34: mod_base = OTHER; note = 2'-O-methyl nucleotide
  modified_base 35: mod_base = OTHER; note = 2'-O-methyl nucleotide
  modified_base 36: mod_base = OTHER; note = 2'-O-methyl nucleotide
  modified_base 37: mod_base = OTHER; note = 2'-O-methyl nucleotide
  modified_base 38: mod_base = OTHER; note = 2'-O-methyl nucleotide
  modified_base 39: mod_base = OTHER; note = 2'-O-methyl nucleotide
  modified_base 40: mod_base = OTHER; note = 2'-O-methyl nucleotide
  modified_base 41: mod_base = OTHER; note = 2'-O-methyl nucleotide
  modified_base 42: mod_base = OTHER; note = 2'-O-methyl nucleotide
  modified_base 71: mod_base = OTHER; note = 2'-O-methyl nucleotide
  modified_base 72: mod_base = OTHER; note = 2'-O-methyl nucleotide
  modified_base 73: mod_base = OTHER; note = 2'-O-methyl nucleotide
  modified_base 74: mod_base = OTHER; note = 2'-O-methyl nucleotide
  modified_base 75: mod_base = OTHER; note = 2'-O-methyl nucleotide
  modified_base 76: mod_base = OTHER; note = 2'-O-methyl nucleotide
  modified_base 77: mod_base = OTHER; note = 2'-O-methyl nucleotide
  modified_base 78: mod_base = OTHER; note = 2'-O-methyl nucleotide
  modified_base 79: mod_base = OTHER; note = 2'-O-methyl nucleotide
  modified_base 80: mod_base = OTHER; note = 2'-O-methyl nucleotide
  modified_base 81: mod_base = OTHER; note = 2'-O-methyl nucleotide
  modified_base 82: mod_base = OTHER; note = 2'-O-methyl nucleotide
  modified_base 83: mod_base = OTHER; note = 2'-O-methyl nucleotide
  modified_base 84: mod_base = OTHER; note = 2'-O-methyl nucleotide
  modified_base 85: mod_base = OTHER; note = 2'-O-methyl nucleotide
  modified_base 86: mod_base = OTHER; note = 2'-O-methyl nucleotide
  modified_base 87: mod_base = OTHER; note = 2'-O-methyl nucleotide
  modified_base 88: mod_base = OTHER; note = 2'-O-methyl nucleotide
  modified_base 89: mod_base = OTHER; note = 2'-O-methyl nucleotide
  modified_base 90: mod_base = OTHER; note = 2'-O-methyl nucleotide
  modified_base 91: mod_base = OTHER; note = 2'-O-methyl nucleotide
  modified_base 92: mod_base = OTHER; note = 2'-O-methyl nucleotide
  modified_base 93: mod_base = OTHER; note = 2'-O-methyl nucleotide
  modified_base 94: mod_base = OTHER; note = 2'-O-methyl nucleotide
  modified_base 95: mod_base = OTHER; note = 2'-O-methyl nucleotide
  modified_base 96: mod_base = OTHER; note = 2'-O-methyl nucleotide
  modified_base 97: mod_base = OTHER; note = 2'-O-methyl nucleotide
  modified_base 98: mod_base = OTHER; note = 2'-O-methyl nucleotide
  modified_base 99: mod_base = OTHER; note = 2'-O-methyl nucleotide, phosphorothioate linkage
  modified_base 100: mod_base = OTHER; note = 2'-O-methyl nucleotide, phosphorothioate linkage
  modified_base 101: mod_base = OTHER; note = 2'-O-methyl nucleotide, phosphorothioate linkage
  modified_base 102: mod_base = OTHER; note = 2'-O-methyl nucleotide
  source 1..102: mol_type = other RNA
ctttttatcagtccctaaatctgttttagagctagaaatagcaagttaaaataaggctagtccgttatcaacttgaaaaagtggcaccgagtcggtgctttt

SEQ ID NO: 2028-2031 - skipped (4 entries)

SEQ ID NO: 2032 - RNA, 100 nt, synthetic construct
  misc_feature 1..100: note = Synthetic
  modified_base 1: mod_base = OTHER; note = 2'-O-methyl nucleotide, phosphorothioate linkage
  modified_base 2: mod_base = OTHER; note = 2'-O-methyl nucleotide, phosphorothioate linkage
  modified_base 3: mod_base = OTHER; note = 2'-O-methyl nucleotide, phosphorothioate linkage
  modified_base 29: mod_base = OTHER; note = 2'-O-methyl nucleotide
  modified_base 30: mod_base = OTHER; note = 2'-O-methyl nucleotide
  modified_base 31: mod_base = OTHER; note = 2'-O-methyl nucleotide
  modified_base 32: mod_base = OTHER; note = 2'-O-methyl nucleotide
  modified_base 33: mod_base = OTHER; note = 2'-O-methyl nucleotide
  modified_base 34: mod_base = OTHER; note = 2'-O-methyl nucleotide
  modified_base 35: mod_base = OTHER; note = 2'-O-methyl nucleotide
  modified_base 36: mod_base = OTHER; note = 2'-O-methyl nucleotide
  modified_base 37: mod_base = OTHER; note = 2'-O-methyl nucleotide
  modified_base 38: mod_base = OTHER; note = 2'-O-methyl nucleotide
  modified_base 39: mod_base = OTHER; note = 2'-O-methyl nucleotide
  modified_base 40: mod_base = OTHER; note = 2'-O-methyl nucleotide
  modified_base 69: mod_base = OTHER; note = 2'-O-methyl nucleotide
  modified_base 70: mod_base = OTHER; note = 2'-O-methyl nucleotide
  modified_base 71: mod_base = OTHER; note = 2'-O-methyl nucleotide
  modified_base 72: mod_base = OTHER; note = 2'-O-methyl nucleotide
  modified_base 73: mod_base = OTHER; note = 2'-O-methyl nucleotide
  modified_base 74: mod_base = OTHER; note = 2'-O-methyl nucleotide
  modified_base 75: mod_base = OTHER; note = 2'-O-methyl nucleotide
  modified_base 76: mod_base = OTHER; note = 2'-O-methyl nucleotide
  modified_base 77: mod_base = OTHER; note = 2'-O-methyl nucleotide
  modified_base 78: mod_base = OTHER; note = 2'-O-methyl nucleotide
  modified_base 79: mod_base = OTHER; note = 2'-O-methyl nucleotide
  modified_base 80: mod_base = OTHER; note = 2'-O-methyl nucleotide
  modified_base 81: mod_base = OTHER; note = 2'-O-methyl nucleotide
  modified_base 82: mod_base = OTHER; note = 2'-O-methyl nucleotide
  modified_base 83: mod_base = OTHER; note = 2'-O-methyl nucleotide
  modified_base 84: mod_base = OTHER; note = 2'-O-methyl nucleotide
  modified_base 85: mod_base = OTHER; note = 2'-O-methyl nucleotide
  modified_base 86: mod_base = OTHER; note = 2'-O-methyl nucleotide
  modified_base 87: mod_base = OTHER; note = 2'-O-methyl nucleotide
  modified_base 88: mod_base = OTHER; note = 2'-O-methyl nucleotide
  modified_base 89: mod_base = OTHER; note = 2'-O-methyl nucleotide
  modified_base 90: mod_base = OTHER; note = 2'-O-methyl nucleotide
  modified_base 91: mod_base = OTHER; note = 2'-O-methyl nucleotide
  modified_base 92: mod_base = OTHER; note = 2'-O-methyl nucleotide
  modified_base 93: mod_base = OTHER; note = 2'-O-methyl nucleotide
  modified_base 94: mod_base = OTHER; note = 2'-O-methyl nucleotide
  modified_base 95: mod_base = OTHER; note = 2'-O-methyl nucleotide
  modified_base 96: mod_base = OTHER; note = 2'-O-methyl nucleotide
  modified_base 97: mod_base = OTHER; note = 2'-O-methyl nucleotide, phosphorothioate linkage
  modified_base 98: mod_base = OTHER; note = 2'-O-methyl nucleotide, phosphorothioate linkage
  modified_base 99: mod_base = OTHER; note = 2'-O-methyl nucleotide, phosphorothioate linkage
  modified_base 100: mod_base = OTHER; note = 2'-O-methyl nucleotide
  source 1..100: mol_type = other RNA
tttagggactgataaagatagttttagagctagaaatagcaagttaaaataaggctagtccgttatcaacttgaaaaagtggcaccgagtcggtgctttt

SEQ ID NO: 2033-2044 - skipped (12 entries)

SEQ ID NO: 2045 - RNA, 100 nt, synthetic construct
  misc_feature 1..100: note = Synthetic
  modified_base 1: mod_base = OTHER; note = 2'-O-methyl nucleotide, phosphorothioate linkage
  modified_base 2: mod_base = OTHER; note = 2'-O-methyl nucleotide, phosphorothioate linkage
  modified_base 3: mod_base = OTHER; note = 2'-O-methyl nucleotide, phosphorothioate linkage
  modified_base 29: mod_base = OTHER; note = 2'-O-methyl nucleotide
  modified_base 30: mod_base = OTHER; note = 2'-O-methyl nucleotide
  modified_base 31: mod_base = OTHER; note = 2'-O-methyl nucleotide
  modified_base 32: mod_base = OTHER; note = 2'-O-methyl nucleotide
  modified_base 33: mod_base = OTHER; note = 2'-O-methyl nucleotide
  modified_base 34: mod_base = OTHER; note = 2'-O-methyl nucleotide
  modified_base 35: mod_base = OTHER; note = 2'-O-methyl nucleotide
  modified_base 36: mod_base = OTHER; note = 2'-O-methyl nucleotide
  modified_base 37: mod_base = OTHER; note = 2'-O-methyl nucleotide
  modified_base 38: mod_base = OTHER; note = 2'-O-methyl nucleotide
  modified_base 39: mod_base = OTHER; note = 2'-O-methyl nucleotide
  modified_base 40: mod_base = OTHER; note = 2'-O-methyl nucleotide
  modified_base 69: mod_base = OTHER; note = 2'-O-methyl nucleotide
  modified_base 70: mod_base = OTHER; note = 2'-O-methyl nucleotide
  modified_base 71: mod_base = OTHER; note = 2'-O-methyl nucleotide
  modified_base 72: mod_base = OTHER; note = 2'-O-methyl nucleotide
  modified_base 73: mod_base = OTHER; note = 2'-O-methyl nucleotide
  modified_base 74: mod_base = OTHER; note = 2'-O-methyl nucleotide
  modified_base 75: mod_base = OTHER; note = 2'-O-methyl nucleotide
  modified_base 76: mod_base = OTHER; note = 2'-O-methyl nucleotide
  modified_base 77: mod_base = OTHER; note = 2'-O-methyl nucleotide
  modified_base 78: mod_base = OTHER; note = 2'-O-methyl nucleotide
  modified_base 79: mod_base = OTHER; note = 2'-O-methyl nucleotide
  modified_base 80: mod_base = OTHER; note = 2'-O-methyl nucleotide
  modified_base 81: mod_base = OTHER; note = 2'-O-methyl nucleotide
  modified_base 82: mod_base = OTHER; note = 2'-O-methyl nucleotide
  modified_base 83: mod_base = OTHER; note = 2'-O-methyl nucleotide
  modified_base 84: mod_base = OTHER; note = 2'-O-methyl nucleotide
  modified_base 85: mod_base = OTHER; note = 2'-O-methyl nucleotide
  modified_base 86: mod_base = OTHER; note = 2'-O-methyl nucleotide
  modified_base 87: mod_base = OTHER; note = 2'-O-methyl nucleotide
  modified_base 88: mod_base = OTHER; note = 2'-O-methyl nucleotide
  modified_base 89: mod_base = OTHER; note = 2'-O-methyl nucleotide
  modified_base 90: mod_base = OTHER; note = 2'-O-methyl nucleotide
  modified_base 91: mod_base = OTHER; note = 2'-O-methyl nucleotide
  modified_base 92: mod_base = OTHER; note = 2'-O-methyl nucleotide
  modified_base 93: mod_base = OTHER; note = 2'-O-methyl nucleotide
  modified_base 94: mod_base = OTHER; note = 2'-O-methyl nucleotide
  modified_base 95: mod_base = OTHER; note = 2'-O-methyl nucleotide
  modified_base 96: mod_base = OTHER; note = 2'-O-methyl nucleotide
  modified_base 97: mod_base = OTHER; note = 2'-O-methyl nucleotide, phosphorothioate linkage
  modified_base 98: mod_base = OTHER; note = 2'-O-methyl nucleotide, phosphorothioate linkage
  modified_base 99: mod_base = OTHER; note = 2'-O-methyl nucleotide, phosphorothioate linkage
  modified_base 100: mod_base = OTHER; note = 2'-O-methyl nucleotide
  source 1..100: mol_type = other RNA
ccttaatcatggtggaaactgttttagagctagaaatagcaagttaaaataaggctagtccgttatcaacttgaaaaagtggcaccgagtcggtgctttt

SEQ ID NO: 2046-2047 - skipped (2 entries)

SEQ ID NO: 2048 - RNA, 99 nt, synthetic construct
  misc_feature 1..99: note = Synthetic
  modified_base 1: mod_base = OTHER; note = 2'-O-methyl nucleotide, phosphorothioate linkage
  modified_base 2: mod_base = OTHER; note = 2'-O-methyl nucleotide, phosphorothioate linkage
  modified_base 3: mod_base = OTHER; note = 2'-O-methyl nucleotide, phosphorothioate linkage
  modified_base 28: mod_base = OTHER; note = 2'-O-methyl nucleotide
  modified_base 29: mod_base = OTHER; note = 2'-O-methyl nucleotide
  modified_base 30: mod_base = OTHER; note = 2'-O-methyl nucleotide
  modified_base 31: mod_base = OTHER; note = 2'-O-methyl nucleotide
  modified_base 32: mod_base = OTHER; note = 2'-O-methyl nucleotide
  modified_base 33: mod_base = OTHER; note = 2'-O-methyl nucleotide
  modified_base 34: mod_base = OTHER; note = 2'-O-methyl nucleotide
  modified_base 35: mod_base = OTHER; note = 2'-O-methyl nucleotide
  modified_base 36: mod_base = OTHER; note = 2'-O-methyl nucleotide
  modified_base 37: mod_base = OTHER; note = 2'-O-methyl nucleotide
  modified_base 38: mod_base = OTHER; note = 2'-O-methyl nucleotide
  modified_base 39: mod_base = OTHER; note = 2'-O-methyl nucleotide
  modified_base 68: mod_base = OTHER; note = 2'-O-methyl nucleotide
  modified_base 69: mod_base = OTHER; note = 2'-O-methyl nucleotide
  modified_base 70: mod_base = OTHER; note = 2'-O-methyl nucleotide
  modified_base 71: mod_base = OTHER; note = 2'-O-methyl nucleotide
  modified_base 72: mod_base = OTHER; note = 2'-O-methyl nucleotide
  modified_base 73: mod_base = OTHER; note = 2'-O-methyl nucleotide
  modified_base 74: mod_base = OTHER; note = 2'-O-methyl nucleotide
  modified_base 75: mod_base = OTHER; note = 2'-O-methyl nucleotide
  modified_base 76: mod_base = OTHER; note = 2'-O-methyl nucleotide
  modified_base 77: mod_base = OTHER; note = 2'-O-methyl nucleotide
  modified_base 78: mod_base = OTHER; note = 2'-O-methyl nucleotide
  modified_base 79: mod_base = OTHER; note = 2'-O-methyl nucleotide
  modified_base 80: mod_base = OTHER; note = 2'-O-methyl nucleotide
  modified_base 81: mod_base = OTHER; note = 2'-O-methyl nucleotide
  modified_base 82: mod_base = OTHER; note = 2'-O-methyl nucleotide
  modified_base 83: mod_base = OTHER; note = 2'-O-methyl nucleotide
  modified_base 84: mod_base = OTHER; note = 2'-O-methyl nucleotide
  modified_base 85: mod_base = OTHER; note = 2'-O-methyl nucleotide
  modified_base 86: mod_base = OTHER; note = 2'-O-methyl nucleotide
  modified_base 87: mod_base = OTHER; note = 2'-O-methyl nucleotide
  modified_base 88: mod_base = OTHER; note = 2'-O-methyl nucleotide
  modified_base 89: mod_base = OTHER; note = 2'-O-methyl nucleotide
  modified_base 90: mod_base = OTHER; note = 2'-O-methyl nucleotide
  modified_base 91: mod_base = OTHER; note = 2'-O-methyl nucleotide
  modified_base 92: mod_base = OTHER; note = 2'-O-methyl nucleotide
  modified_base 93: mod_base = OTHER; note = 2'-O-methyl nucleotide
  modified_base 94: mod_base = OTHER; note = 2'-O-methyl nucleotide
  modified_base 95: mod_base = OTHER; note = 2'-O-methyl nucleotide
  modified_base 96: mod_base = OTHER; note = 2'-O-methyl nucleotide, phosphorothioate linkage
  modified_base 97: mod_base = OTHER; note = 2'-O-methyl nucleotide, phosphorothioate linkage
  modified_base 98: mod_base = OTHER; note = 2'-O-methyl nucleotide, phosphorothioate linkage
  modified_base 99: mod_base = OTHER; note = 2'-O-methyl nucleotide
  source 1..99: mol_type = other RNA
gaaggtgactctgacttctgttttagagctagaaatagcaagttaaaataaggctagtccgttatcaacttgaaaaagtggcaccgagtcggtgctttt

SEQ ID NO: 2049-2062 - skipped (14 entries)

SEQ ID NO: 2063 - RNA, 100 nt, synthetic construct; identical to SEQ ID NO: 1063
  misc_feature 1..100: note = Synthetic
  modified_base 1: mod_base = OTHER; note = 2'-O-methyl nucleotide, phosphorothioate linkage
  modified_base 2: mod_base = OTHER; note = 2'-O-methyl nucleotide, phosphorothioate linkage
  modified_base 3: mod_base = OTHER; note = 2'-O-methyl nucleotide, phosphorothioate linkage
  modified_base 29: mod_base = OTHER; note = 2'-O-methyl nucleotide
  modified_base 30: mod_base = OTHER; note = 2'-O-methyl nucleotide
  modified_base 31: mod_base = OTHER; note = 2'-O-methyl nucleotide
  modified_base 32: mod_base = OTHER; note = 2'-O-methyl nucleotide
  modified_base 33: mod_base = OTHER; note = 2'-O-methyl nucleotide
  modified_base 34: mod_base = OTHER; note = 2'-O-methyl nucleotide
  modified_base 35: mod_base = OTHER; note = 2'-O-methyl nucleotide
  modified_base 36: mod_base = OTHER; note = 2'-O-methyl nucleotide
  modified_base 37: mod_base = OTHER; note = 2'-O-methyl nucleotide
  modified_base 38: mod_base = OTHER; note = 2'-O-methyl nucleotide
  modified_base 39: mod_base = OTHER; note = 2'-O-methyl nucleotide
  modified_base 40: mod_base = OTHER; note = 2'-O-methyl nucleotide
  modified_base 69: mod_base = OTHER; note = 2'-O-methyl nucleotide
  modified_base 70: mod_base = OTHER; note = 2'-O-methyl nucleotide
  modified_base 71: mod_base = OTHER; note = 2'-O-methyl nucleotide
  modified_base 72: mod_base = OTHER; note = 2'-O-methyl nucleotide
  modified_base 73: mod_base = OTHER; note = 2'-O-methyl nucleotide
  modified_base 74: mod_base = OTHER; note = 2'-O-methyl nucleotide
  modified_base 75: mod_base = OTHER; note = 2'-O-methyl nucleotide
  modified_base 76: mod_base = OTHER; note = 2'-O-methyl nucleotide
  modified_base 77: mod_base = OTHER; note = 2'-O-methyl nucleotide
  modified_base 78: mod_base = OTHER; note = 2'-O-methyl nucleotide
  modified_base 79: mod_base = OTHER; note = 2'-O-methyl nucleotide
  modified_base 80: mod_base = OTHER; note = 2'-O-methyl nucleotide
  modified_base 81: mod_base = OTHER; note = 2'-O-methyl nucleotide
  modified_base 82: mod_base = OTHER; note = 2'-O-methyl nucleotide
  modified_base 83: mod_base = OTHER; note = 2'-O-methyl nucleotide
  modified_base 84: mod_base = OTHER; note = 2'-O-methyl nucleotide
  modified_base 85: mod_base = OTHER; note = 2'-O-methyl nucleotide
  modified_base 86: mod_base = OTHER; note = 2'-O-methyl nucleotide
  modified_base 87: mod_base = OTHER; note = 2'-O-methyl nucleotide
  modified_base 88: mod_base = OTHER; note = 2'-O-methyl nucleotide
  modified_base 89: mod_base = OTHER; note = 2'-O-methyl nucleotide
  modified_base 90: mod_base = OTHER; note = 2'-O-methyl nucleotide
  modified_base 91: mod_base = OTHER; note = 2'-O-methyl nucleotide
  modified_base 92: mod_base = OTHER; note = 2'-O-methyl nucleotide
  modified_base 93: mod_base = OTHER; note = 2'-O-methyl nucleotide
  modified_base 94: mod_base = OTHER; note = 2'-O-methyl nucleotide
  modified_base 95: mod_base = OTHER; note = 2'-O-methyl nucleotide
  modified_base 96: mod_base = OTHER; note = 2'-O-methyl nucleotide
  modified_base 97: mod_base = OTHER; note = 2'-O-methyl nucleotide, phosphorothioate linkage
  modified_base 98: mod_base = OTHER; note = 2'-O-methyl nucleotide, phosphorothioate linkage
  modified_base 99: mod_base = OTHER; note = 2'-O-methyl nucleotide, phosphorothioate linkage
  modified_base 100: mod_base = OTHER; note = 2'-O-methyl nucleotide
  source 1..100: mol_type = other RNA

SEQ ID NO: 2064-2066 - skipped (3 entries)

SEQ ID NO: 2067 - RNA, 100 nt, synthetic construct; identical to SEQ ID NO: 1067
  misc_feature 1..100: note = Synthetic
  modified_base 1: mod_base = OTHER; note = 2'-O-methyl nucleotide, phosphorothioate linkage
  modified_base 2: mod_base = OTHER; note = 2'-O-methyl nucleotide, phosphorothioate linkage
  modified_base 3: mod_base = OTHER; note = 2'-O-methyl nucleotide, phosphorothioate linkage
  modified_base 29: mod_base = OTHER; note = 2'-O-methyl nucleotide
  modified_base 30: mod_base = OTHER; note = 2'-O-methyl nucleotide
  modified_base 31: mod_base = OTHER; note = 2'-O-methyl nucleotide
  modified_base 32: mod_base = OTHER; note = 2'-O-methyl nucleotide
  modified_base 33: mod_base = OTHER; note = 2'-O-methyl nucleotide
  modified_base 34: mod_base = OTHER; note = 2'-O-methyl nucleotide
  modified_base 35: mod_base = OTHER; note = 2'-O-methyl nucleotide
  modified_base 36: mod_base = OTHER; note = 2'-O-methyl nucleotide
  modified_base 37: mod_base = OTHER; note = 2'-O-methyl nucleotide
  modified_base 38: mod_base = OTHER; note = 2'-O-methyl nucleotide
  modified_base 39: mod_base = OTHER; note = 2'-O-methyl nucleotide
  modified_base 40: mod_base = OTHER; note = 2'-O-methyl nucleotide
  modified_base 69: mod_base = OTHER; note = 2'-O-methyl nucleotide
  modified_base 70: mod_base = OTHER; note = 2'-O-methyl nucleotide
  modified_base 71: mod_base = OTHER; note = 2'-O-methyl nucleotide
  modified_base 72: mod_base = OTHER; note = 2'-O-methyl nucleotide
  modified_base 73: mod_base = OTHER; note = 2'-O-methyl nucleotide
  modified_base 74: mod_base = OTHER; note = 2'-O-methyl nucleotide
  modified_base 75: mod_base = OTHER; note = 2'-O-methyl nucleotide
  modified_base 76: mod_base = OTHER; note = 2'-O-methyl nucleotide
  modified_base 77: mod_base = OTHER; note = 2'-O-methyl nucleotide
  modified_base 78: mod_base = OTHER; note = 2'-O-methyl nucleotide
  modified_base 79: mod_base = OTHER; note = 2'-O-methyl nucleotide
  modified_base 80: mod_base = OTHER; note = 2'-O-methyl nucleotide
  modified_base 81: mod_base = OTHER; note = 2'-O-methyl nucleotide
  modified_base 82: mod_base = OTHER; note = 2'-O-methyl nucleotide
  modified_base 83: mod_base = OTHER; note = 2'-O-methyl nucleotide
  modified_base 84: mod_base = OTHER; note = 2'-O-methyl nucleotide
  modified_base 85: mod_base = OTHER; note = 2'-O-methyl nucleotide
  modified_base 86: mod_base = OTHER; note = 2'-O-methyl nucleotide
  modified_base 87: mod_base = OTHER; note = 2'-O-methyl nucleotide
  modified_base 88: mod_base = OTHER; note = 2'-O-methyl nucleotide
  modified_base 89: mod_base = OTHER; note = 2'-O-methyl nucleotide
  modified_base 90: mod_base = OTHER; note = 2'-O-methyl nucleotide
  modified_base 91: mod_base = OTHER; note = 2'-O-methyl nucleotide
  modified_base 92: mod_base = OTHER; note = 2'-O-methyl nucleotide
  modified_base 93: mod_base = OTHER; note = 2'-O-methyl nucleotide
  modified_base 94: mod_base = OTHER; note = 2'-O-methyl nucleotide
  modified_base 95: mod_base = OTHER; note = 2'-O-methyl nucleotide
  modified_base 96: mod_base = OTHER; note = 2'-O-methyl nucleotide
  modified_base 97: mod_base = OTHER; note = 2'-O-methyl nucleotide, phosphorothioate linkage
  modified_base 98: mod_base = OTHER; note = 2'-O-methyl nucleotide, phosphorothioate linkage
  modified_base 99: mod_base = OTHER; note = 2'-O-methyl nucleotide, phosphorothioate linkage
  modified_base 100: mod_base = OTHER; note = 2'-O-methyl nucleotide
  source 1..100: mol_type = other RNA

SEQ ID NO: 2068 - skipped

SEQ ID NO: 2069 - RNA, 100 nt, synthetic construct; identical to SEQ ID NO: 1069
  misc_feature 1..100: note = Synthetic
  modified_base 1: mod_base = OTHER; note = 2'-O-methyl nucleotide, phosphorothioate linkage
  modified_base 2: mod_base = OTHER; note = 2'-O-methyl nucleotide, phosphorothioate linkage
  modified_base 3: mod_base = OTHER; note = 2'-O-methyl nucleotide, phosphorothioate linkage
  modified_base 29: mod_base = OTHER; note = 2'-O-methyl nucleotide
  modified_base 30: mod_base = OTHER; note = 2'-O-methyl nucleotide
  modified_base 31: mod_base = OTHER; note = 2'-O-methyl nucleotide
  modified_base 32: mod_base = OTHER; note = 2'-O-methyl nucleotide
  modified_base 33: mod_base = OTHER; note = 2'-O-methyl nucleotide
  modified_base 34: mod_base = OTHER; note = 2'-O-methyl nucleotide
  modified_base 35: mod_base = OTHER; note = 2'-O-methyl nucleotide
  modified_base 36: mod_base = OTHER; note = 2'-O-methyl nucleotide
  modified_base 37: mod_base = OTHER; note = 2'-O-methyl nucleotide
  modified_base 38: mod_base = OTHER; note = 2'-O-methyl nucleotide
  modified_base 39: mod_base = OTHER; note = 2'-O-methyl nucleotide
  modified_base 40: mod_base = OTHER; note = 2'-O-methyl nucleotide
  modified_base 69: mod_base = OTHER; note = 2'-O-methyl nucleotide
  modified_base 70: mod_base = OTHER; note = 2'-O-methyl nucleotide
  modified_base 71: mod_base = OTHER; note = 2'-O-methyl nucleotide
  modified_base 72: mod_base = OTHER; note = 2'-O-methyl nucleotide
  modified_base 73: mod_base = OTHER; note = 2'-O-methyl nucleotide
  modified_base 74: mod_base = OTHER; note = 2'-O-methyl nucleotide
  modified_base 75: mod_base = OTHER; note = 2'-O-methyl nucleotide
  modified_base 76: mod_base = OTHER; note = 2'-O-methyl nucleotide
  modified_base 77: mod_base = OTHER; note = 2'-O-methyl nucleotide
  modified_base 78: mod_base = OTHER; note = 2'-O-methyl nucleotide
  modified_base 79: mod_base = OTHER; note = 2'-O-methyl nucleotide
  modified_base 80: mod_base = OTHER; note = 2'-O-methyl nucleotide
  modified_base 81: mod_base = OTHER; note = 2'-O-methyl nucleotide
  modified_base 82: mod_base = OTHER; note = 2'-O-methyl nucleotide
  modified_base 83: mod_base = OTHER; note = 2'-O-methyl nucleotide
  modified_base 84: mod_base = OTHER; note = 2'-O-methyl nucleotide
  modified_base 85: mod_base = OTHER; note = 2'-O-methyl nucleotide
  modified_base 86: mod_base = OTHER; note = 2'-O-methyl nucleotide
  modified_base 87: mod_base = OTHER; note = 2'-O-methyl nucleotide
  modified_base 88: mod_base = OTHER; note = 2'-O-methyl nucleotide
  modified_base 89: mod_base = OTHER; note = 2'-O-methyl nucleotide
  modified_base 90: mod_base = OTHER; note = 2'-O-methyl nucleotide
  modified_base 91: mod_base = OTHER; note = 2'-O-methyl nucleotide
  modified_base 92: mod_base = OTHER; note = 2'-O-methyl nucleotide
  modified_base 93: mod_base = OTHER; note = 2'-O-methyl nucleotide
  modified_base 94: mod_base = OTHER; note = 2'-O-methyl nucleotide
  modified_base 95: mod_base = OTHER; note = 2'-O-methyl nucleotide
  modified_base 96: mod_base = OTHER; note = 2'-O-methyl nucleotide
  modified_base 97: mod_base = OTHER; note = 2'-O-methyl nucleotide, phosphorothioate linkage
  modified_base 98: mod_base = OTHER; note = 2'-O-methyl nucleotide, phosphorothioate linkage
  modified_base 99: mod_base = OTHER; note = 2'-O-methyl nucleotide, phosphorothioate linkage
  modified_base 100: mod_base = OTHER; note = 2'-O-methyl nucleotide
  source 1..100: mol_type = other RNA

SEQ ID NO: 2070 - skipped

SEQ ID NO: 2071 - RNA, 100 nt, synthetic construct; identical to SEQ ID NO: 1071
  misc_feature 1..100: note = Synthetic
  modified_base 1: mod_base = OTHER; note = 2'-O-methyl nucleotide, phosphorothioate linkage
  modified_base 2: mod_base = OTHER; note = 2'-O-methyl nucleotide, phosphorothioate linkage
  modified_base 3: mod_base = OTHER; note = 2'-O-methyl nucleotide, phosphorothioate linkage
  modified_base 29: mod_base = OTHER; note = 2'-O-methyl nucleotide
  modified_base 30: mod_base = OTHER; note = 2'-O-methyl nucleotide
  modified_base 31: mod_base = OTHER; note = 2'-O-methyl nucleotide
  modified_base 32: mod_base = OTHER; note = 2'-O-methyl nucleotide
  modified_base 33: mod_base = OTHER; note = 2'-O-methyl nucleotide
  modified_base 34: mod_base = OTHER; note = 2'-O-methyl nucleotide
  modified_base 35: mod_base = OTHER; note = 2'-O-methyl nucleotide
  modified_base 36: mod_base = OTHER; note = 2'-O-methyl nucleotide
  modified_base 37: mod_base = OTHER; note = 2'-O-methyl nucleotide
  modified_base 38: mod_base = OTHER; note = 2'-O-methyl nucleotide
  modified_base 39: mod_base = OTHER; note = 2'-O-methyl nucleotide
  modified_base 40: mod_base = OTHER; note = 2'-O-methyl nucleotide
  modified_base 69: mod_base = OTHER; note = 2'-O-methyl nucleotide
  modified_base 70: mod_base = OTHER; note = 2'-O-methyl nucleotide
  modified_base 71: mod_base = OTHER; note = 2'-O-methyl nucleotide
  modified_base 72: mod_base = OTHER; note = 2'-O-methyl nucleotide
  modified_base 73: mod_base = OTHER; note = 2'-O-methyl nucleotide
  modified_base 74: mod_base = OTHER; note = 2'-O-methyl nucleotide
  modified_base 75: mod_base = OTHER; note = 2'-O-methyl nucleotide
  modified_base 76: mod_base = OTHER; note = 2'-O-methyl nucleotide
  modified_base 77: mod_base = OTHER; note = 2'-O-methyl nucleotide
  modified_base 78: mod_base = OTHER; note = 2'-O-methyl nucleotide
  modified_base 79: mod_base = OTHER; note = 2'-O-methyl nucleotide
  modified_base 80: mod_base = OTHER; note = 2'-O-methyl nucleotide
  modified_base 81: mod_base = OTHER; note = 2'-O-methyl nucleotide
  modified_base 82: mod_base = OTHER; note = 2'-O-methyl nucleotide
  modified_base 83: mod_base = OTHER; note = 2'-O-methyl nucleotide
  modified_base 84: mod_base = OTHER; note = 2'-O-methyl nucleotide
  modified_base 85: mod_base = OTHER; note = 2'-O-methyl nucleotide
  modified_base 86: mod_base = OTHER; note = 2'-O-methyl nucleotide
  modified_base 87: mod_base = OTHER; note = 2'-O-methyl nucleotide
  modified_base 88: mod_base = OTHER; note = 2'-O-methyl nucleotide
  modified_base 89: mod_base = OTHER; note = 2'-O-methyl nucleotide
  modified_base 90: mod_base = OTHER; note = 2'-O-methyl nucleotide
  modified_base 91: mod_base = OTHER; note = 2'-O-methyl nucleotide
  modified_base 92: mod_base = OTHER; note = 2'-O-methyl nucleotide
  modified_base 93: mod_base = OTHER; note = 2'-O-methyl nucleotide
  modified_base 94: mod_base = OTHER; note = 2'-O-methyl nucleotide
  modified_base 95: mod_base = OTHER; note = 2'-O-methyl nucleotide
  modified_base 96: mod_base = OTHER; note = 2'-O-methyl nucleotide
  modified_base 97: mod_base = OTHER; note = 2'-O-methyl nucleotide, phosphorothioate linkage
  modified_base 98: mod_base = OTHER; note = 2'-O-methyl nucleotide, phosphorothioate linkage
  modified_base 99: mod_base = OTHER; note = 2'-O-methyl nucleotide, phosphorothioate linkage
  modified_base 100: mod_base = OTHER; note = 2'-O-methyl nucleotide
  source 1..100: mol_type = other RNA

SEQ ID NO: 2072-2073 - skipped (2 entries)

SEQ ID NO: 2074 - RNA, 100 nt, synthetic construct; identical to SEQ ID NO: 1074
  misc_feature 1..100: note = Synthetic
  modified_base 1: mod_base = OTHER; note = 2'-O-methyl nucleotide, phosphorothioate linkage
  modified_base 2: mod_base = OTHER; note = 2'-O-methyl nucleotide, phosphorothioate linkage
  modified_base 3: mod_base = OTHER; note = 2'-O-methyl nucleotide, phosphorothioate linkage
  modified_base 29: mod_base = OTHER; note = 2'-O-methyl nucleotide
  modified_base 30: mod_base = OTHER; note = 2'-O-methyl nucleotide
  modified_base 31: mod_base = OTHER; note = 2'-O-methyl nucleotide
  modified_base 32: mod_base = OTHER; note = 2'-O-methyl nucleotide
  modified_base 33: mod_base = OTHER; note = 2'-O-methyl nucleotide
  modified_base 34: mod_base = OTHER; note = 2'-O-methyl nucleotide
  modified_base 35: mod_base = OTHER; note = 2'-O-methyl nucleotide
  modified_base 36: mod_base = OTHER; note = 2'-O-methyl nucleotide
  modified_base 37: mod_base = OTHER; note = 2'-O-methyl nucleotide
  modified_base 38: mod_base = OTHER; note = 2'-O-methyl nucleotide
  modified_base 39: mod_base = OTHER; note = 2'-O-methyl nucleotide
  modified_base 40: mod_base = OTHER; note = 2'-O-methyl nucleotide
  modified_base 69: mod_base = OTHER; note = 2'-O-methyl nucleotide
  modified_base 70: mod_base = OTHER; note = 2'-O-methyl nucleotide
  modified_base 71: mod_base = OTHER; note = 2'-O-methyl nucleotide
  modified_base 72: mod_base = OTHER; note = 2'-O-methyl nucleotide
  modified_base 73: mod_base = OTHER; note = 2'-O-methyl nucleotide
  modified_base 74: mod_base = OTHER; note = 2'-O-methyl nucleotide
  modified_base 75: mod_base = OTHER; note = 2'-O-methyl nucleotide
  modified_base 76: mod_base = OTHER; note = 2'-O-methyl nucleotide
  modified_base 77: mod_base = OTHER; note = 2'-O-methyl nucleotide
  modified_base 78: mod_base = OTHER; note = 2'-O-methyl nucleotide
  modified_base 79: mod_base = OTHER; note = 2'-O-methyl nucleotide
  modified_base 80: mod_base = OTHER; note = 2'-O-methyl nucleotide
  modified_base 81: mod_base = OTHER; note = 2'-O-methyl nucleotide
  modified_base 82: mod_base = OTHER; note = 2'-O-methyl nucleotide
  modified_base 83: mod_base = OTHER; note = 2'-O-methyl nucleotide
  modified_base 84: mod_base = OTHER; note = 2'-O-methyl nucleotide
  modified_base 85: mod_base = OTHER; note = 2'-O-methyl nucleotide
  modified_base 86: mod_base = OTHER; note = 2'-O-methyl nucleotide
  modified_base 87: mod_base = OTHER; note = 2'-O-methyl nucleotide
  modified_base 88: mod_base = OTHER; note = 2'-O-methyl nucleotide
  modified_base 89: mod_base = OTHER; note = 2'-O-methyl nucleotide
  modified_base 90: mod_base = OTHER; note = 2'-O-methyl nucleotide
  modified_base 91: mod_base = OTHER; note = 2'-O-methyl nucleotide
  modified_base 92: mod_base = OTHER; note = 2'-O-methyl nucleotide
  modified_base 93: mod_base = OTHER; note = 2'-O-methyl nucleotide
  modified_base 94: mod_base = OTHER; note = 2'-O-methyl nucleotide
  modified_base 95: mod_base = OTHER; note = 2'-O-methyl nucleotide
  modified_base 96: mod_base = OTHER; note = 2'-O-methyl nucleotide
  modified_base 97: mod_base = OTHER; note = 2'-O-methyl nucleotide, phosphorothioate linkage
  modified_base 98: mod_base = OTHER; note = 2'-O-methyl nucleotide, phosphorothioate linkage
  modified_base 99: mod_base = OTHER; note = 2'-O-methyl nucleotide, phosphorothioate linkage
  modified_base 100: mod_base = OTHER; note = 2'-O-methyl nucleotide
  source 1..100: mol_type = other RNA

SEQ ID NO: 2075 - skipped

SEQ ID NO: 2076 - RNA, 100 nt, synthetic construct; identical to SEQ ID NO: 1076
  misc_feature 1..100: note = Synthetic
  modified_base 1: mod_base = OTHER; note = 2'-O-methyl nucleotide, phosphorothioate linkage
  modified_base 2: mod_base = OTHER; note = 2'-O-methyl nucleotide, phosphorothioate linkage
  modified_base 3: mod_base = OTHER; note = 2'-O-methyl nucleotide, phosphorothioate linkage
  modified_base 29: mod_base = OTHER; note = 2'-O-methyl nucleotide
  modified_base 30: mod_base = OTHER; note = 2'-O-methyl nucleotide
  modified_base 31: mod_base = OTHER; note = 2'-O-methyl nucleotide
  modified_base 32: mod_base = OTHER; note = 2'-O-methyl nucleotide
  modified_base 33: mod_base = OTHER; note = 2'-O-methyl nucleotide
  modified_base 34: mod_base = OTHER; note = 2'-O-methyl nucleotide
  modified_base 35: mod_base = OTHER; note = 2'-O-methyl nucleotide
  modified_base 36: mod_base = OTHER; note = 2'-O-methyl nucleotide
  modified_base 37: mod_base = OTHER; note = 2'-O-methyl nucleotide
  modified_base 38: mod_base = OTHER; note = 2'-O-methyl nucleotide
  modified_base 39: mod_base = OTHER; note = 2'-O-methyl nucleotide
  modified_base 40: mod_base = OTHER; note = 2'-O-methyl nucleotide
  modified_base 69: mod_base = OTHER; note = 2'-O-methyl nucleotide
  modified_base 70: mod_base = OTHER; note = 2'-O-methyl nucleotide
  modified_base 71: mod_base = OTHER; note = 2'-O-methyl nucleotide
  modified_base 72: mod_base = OTHER; note = 2'-O-methyl nucleotide
  modified_base 73: mod_base = OTHER; note = 2'-O-methyl nucleotide
  modified_base 74: mod_base = OTHER; note = 2'-O-methyl nucleotide
  modified_base 75: mod_base = OTHER; note = 2'-O-methyl nucleotide
  modified_base 76: mod_base = OTHER; note = 2'-O-methyl nucleotide
  modified_base 77: mod_base = OTHER; note = 2'-O-methyl nucleotide
  modified_base 78: mod_base = OTHER; note = 2'-O-methyl nucleotide
  modified_base 79: mod_base = OTHER; note = 2'-O-methyl nucleotide
  modified_base 80: mod_base = OTHER; note = 2'-O-methyl nucleotide
  modified_base 81: mod_base = OTHER; note = 2'-O-methyl nucleotide
  modified_base 82: mod_base = OTHER; note = 2'-O-methyl nucleotide
  modified_base 83: mod_base = OTHER; note = 2'-O-methyl nucleotide
  modified_base 84: mod_base = OTHER; note = 2'-O-methyl nucleotide
  modified_base 85: mod_base = OTHER; note = 2'-O-methyl nucleotide
  modified_base 86: mod_base = OTHER; note = 2'-O-methyl nucleotide
  modified_base 87: mod_base = OTHER; note = 2'-O-methyl nucleotide
  modified_base 88: mod_base = OTHER; note = 2'-O-methyl nucleotide
  modified_base 89: mod_base = OTHER; note = 2'-O-methyl nucleotide
  modified_base 90: mod_base = OTHER; note = 2'-O-methyl nucleotide
  modified_base 91: mod_base = OTHER; note = 2'-O-methyl nucleotide
  modified_base 92: mod_base = OTHER; note = 2'-O-methyl nucleotide
  modified_base 93: mod_base = OTHER; note = 2'-O-methyl nucleotide
  modified_base 94: mod_base = OTHER; note = 2'-O-methyl nucleotide
  modified_base 95: mod_base = OTHER; note = 2'-O-methyl nucleotide
  modified_base 96: mod_base = OTHER; note = 2'-O-methyl nucleotide
  modified_base 97: mod_base = OTHER; note = 2'-O-methyl nucleotide, phosphorothioate linkage
  modified_base 98: mod_base = OTHER; note = 2'-O-methyl nucleotide, phosphorothioate linkage
  modified_base 99: mod_base = OTHER; note = 2'-O-methyl nucleotide, phosphorothioate linkage
  modified_base 100: mod_base = OTHER; note = 2'-O-methyl nucleotide
  source 1..100: mol_type = other RNA

SEQ ID NO: 2077 - RNA, 100 nt, synthetic construct; identical to SEQ ID NO: 1077
  misc_feature 1..100: note = Synthetic
  modified_base 1: mod_base = OTHER; note = 2'-O-methyl nucleotide, phosphorothioate linkage
  modified_base 2: mod_base = OTHER; note = 2'-O-methyl nucleotide, phosphorothioate linkage
  modified_base 3: mod_base = OTHER; note = 2'-O-methyl nucleotide, phosphorothioate linkage
  modified_base 29: mod_base = OTHER; note = 2'-O-methyl nucleotide
  modified_base 30: mod_base = OTHER; note = 2'-O-methyl nucleotide
  modified_base 31: mod_base = OTHER; note = 2'-O-methyl nucleotide
  modified_base 32: mod_base = OTHER; note = 2'-O-methyl nucleotide
  modified_base 33: mod_base = OTHER; note = 2'-O-methyl nucleotide
  modified_base 34: mod_base = OTHER; note = 2'-O-methyl nucleotide
  modified_base 35: mod_base = OTHER; note = 2'-O-methyl nucleotide
  modified_base 36: mod_base = OTHER; note = 2'-O-methyl nucleotide
  modified_base 37: mod_base = OTHER; note = 2'-O-methyl nucleotide
  modified_base 38: mod_base = OTHER; note = 2'-O-methyl nucleotide
  modified_base 39: mod_base = OTHER; note = 2'-O-methyl nucleotide
  modified_base 40: mod_base = OTHER; note = 2'-O-methyl nucleotide
  modified_base 69: mod_base = OTHER; note = 2'-O-methyl nucleotide
  modified_base 70: mod_base = OTHER; note = 2'-O-methyl nucleotide
  modified_base 71: mod_base = OTHER; note = 2'-O-methyl nucleotide
  modified_base 72: mod_base = OTHER; note = 2'-O-methyl nucleotide
  modified_base 73: mod_base = OTHER; note = 2'-O-methyl nucleotide
  modified_base 74: mod_base = OTHER; note = 2'-O-methyl nucleotide
  modified_base 75: mod_base = OTHER; note = 2'-O-methyl nucleotide
  modified_base 76: mod_base = OTHER; note = 2'-O-methyl nucleotide
  modified_base 77: mod_base = OTHER; note = 2'-O-methyl nucleotide
  modified_base 78: mod_base = OTHER; note = 2'-O-methyl nucleotide
  modified_base 79: mod_base = OTHER; note = 2'-O-methyl nucleotide
  modified_base 80: mod_base = OTHER; note = 2'-O-methyl nucleotide
  modified_base 81: mod_base = OTHER; note = 2'-O-methyl nucleotide
  modified_base 82: mod_base = OTHER; note = 2'-O-methyl nucleotide
  modified_base 83: mod_base = OTHER; note = 2'-O-methyl nucleotide
  modified_base 84: mod_base = OTHER; note = 2'-O-methyl nucleotide
  modified_base 85: mod_base = OTHER; note = 2'-O-methyl nucleotide
  modified_base 86: mod_base = OTHER; note = 2'-O-methyl nucleotide
  modified_base 87: mod_base = OTHER; note = 2'-O-methyl nucleotide
  modified_base 88: mod_base = OTHER; note = 2'-O-methyl nucleotide
  modified_base 89: mod_base = OTHER; note = 2'-O-methyl nucleotide
  modified_base 90: mod_base = OTHER; note = 2'-O-methyl nucleotide
  modified_base 91: mod_base = OTHER; note = 2'-O-methyl nucleotide
  modified_base 92: mod_base = OTHER; note = 2'-O-methyl nucleotide
  modified_base 93: mod_base = OTHER; note = 2'-O-methyl nucleotide
  modified_base 94: mod_base = OTHER; note = 2'-O-methyl nucleotide
  modified_base 95: mod_base = OTHER; note = 2'-O-methyl nucleotide
  modified_base 96: mod_base = OTHER; note = 2'-O-methyl nucleotide
  modified_base 97: mod_base = OTHER; note = 2'-O-methyl nucleotide, phosphorothioate linkage
  modified_base 98: mod_base = OTHER; note = 2'-O-methyl nucleotide, phosphorothioate linkage
  modified_base 99: mod_base = OTHER; note = 2'-O-methyl nucleotide, phosphorothioate linkage
  modified_base 100: mod_base = OTHER; note = 2'-O-methyl nucleotide
  source 1..100: mol_type = other RNA

SEQ ID NO: 2078 - RNA, 100 nt, synthetic construct
  misc_feature 1..100: note = Synthetic
  modified_base 1: mod_base = OTHER; note = 2'-O-methyl nucleotide, phosphorothioate linkage
  modified_base 2: mod_base = OTHER; note = 2'-O-methyl nucleotide, phosphorothioate linkage
  modified_base 3: mod_base = OTHER; note = 2'-O-methyl nucleotide, phosphorothioate linkage
  modified_base 29: mod_base = OTHER; note = 2'-O-methyl nucleotide
  modified_base 30: mod_base = OTHER; note = 2'-O-methyl nucleotide
  modified_base 31: mod_base = OTHER; note = 2'-O-methyl nucleotide
  modified_base 32: mod_base = OTHER; note = 2'-O-methyl nucleotide
  modified_base 33: mod_base = OTHER; note = 2'-O-methyl nucleotide
  modified_base 34: mod_base = OTHER; note = 2'-O-methyl nucleotide
  modified_base 35: mod_base = OTHER; note = 2'-O-methyl nucleotide
  modified_base 36: mod_base = OTHER; note = 2'-O-methyl nucleotide
  modified_base 37: mod_base = OTHER; note = 2'-O-methyl nucleotide
  modified_base 38: mod_base = OTHER; note = 2'-O-methyl nucleotide
  modified_base 39: mod_base = OTHER; note = 2'-O-methyl nucleotide
  modified_base 40: mod_base = OTHER; note = 2'-O-methyl nucleotide
  modified_base 69: mod_base = OTHER; note = 2'-O-methyl nucleotide
  modified_base 70: mod_base = OTHER; note = 2'-O-methyl nucleotide
  modified_base 71: mod_base = OTHER; note = 2'-O-methyl nucleotide
  modified_base 72: mod_base = OTHER; note = 2'-O-methyl nucleotide
  modified_base 73: mod_base = OTHER; note = 2'-O-methyl nucleotide
  modified_base 74: mod_base = OTHER; note = 2'-O-methyl nucleotide
  modified_base 75: mod_base = OTHER; note = 2'-O-methyl nucleotide
  modified_base 76: mod_base = OTHER; note = 2'-O-methyl nucleotide
  modified_base 77: mod_base = OTHER; note = 2'-O-methyl nucleotide
  modified_base 78: mod_base = OTHER; note = 2'-O-methyl nucleotide
  modified_base 79: mod_base = OTHER; note = 2'-O-methyl nucleotide
  modified_base 80: mod_base = OTHER; note = 2'-O-methyl nucleotide
  modified_base 81: mod_base = OTHER; note = 2'-O-methyl nucleotide
  modified_base 82: mod_base = OTHER; note = 2'-O-methyl nucleotide
  modified_base 83: mod_base = OTHER; note = 2'-O-methyl nucleotide
  modified_base 84: mod_base = OTHER; note = 2'-O-methyl nucleotide
  modified_base 85: mod_base = OTHER; note = 2'-O-methyl nucleotide
  modified_base 86: mod_base = OTHER; note = 2'-O-methyl nucleotide
  modified_base 87: mod_base = OTHER; note = 2'-O-methyl nucleotide
  modified_base 88: mod_base = OTHER; note = 2'-O-methyl nucleotide
  modified_base 89: mod_base = OTHER; note = 2'-O-methyl nucleotide
  modified_base 90: mod_base = OTHER; note = 2'-O-methyl nucleotide
  modified_base 91: mod_base = OTHER; note = 2'-O-methyl nucleotide
  modified_base 92: mod_base = OTHER; note = 2'-O-methyl nucleotide
  modified_base 93: mod_base = OTHER; note = 2'-O-methyl nucleotide
  modified_base 94: mod_base = OTHER; note = 2'-O-methyl nucleotide
  modified_base 95: mod_base = OTHER; note = 2'-O-methyl nucleotide
  modified_base 96: mod_base = OTHER; note = 2'-O-methyl nucleotide
  modified_base 97: mod_base = OTHER; note = 2'-O-methyl nucleotide, phosphorothioate linkage
  modified_base 98: mod_base = OTHER; note = 2'-O-methyl nucleotide, phosphorothioate linkage
  modified_base 99: mod_base = OTHER; note = 2'-O-methyl nucleotide, phosphorothioate linkage
  modified_base 100: mod_base = OTHER; note = 2'-O-methyl nucleotide
  source 1..100: mol_type = other RNA
tcctgagggctcacccatcggttttagagctagaaatagcaagttaaaataaggctagtccgttatcaacttgaaaaagtggcaccgagtcggtgctttt

SEQ ID NO: 2079 - RNA, 100 nt, synthetic construct; identical to SEQ ID NO: 1079
  misc_feature 1..100: note = Synthetic
  modified_base 1: mod_base = OTHER; note = 2'-O-methyl nucleotide, phosphorothioate linkage
  modified_base 2: mod_base = OTHER; note = 2'-O-methyl nucleotide, phosphorothioate linkage
  modified_base 3: mod_base = OTHER; note = 2'-O-methyl nucleotide, phosphorothioate linkage
  modified_base 29: mod_base = OTHER; note = 2'-O-methyl nucleotide
  modified_base 30: mod_base = OTHER; note = 2'-O-methyl nucleotide
  modified_base 31: mod_base = OTHER; note = 2'-O-methyl nucleotide
  modified_base 32: mod_base = OTHER; note = 2'-O-methyl nucleotide
  modified_base 33: mod_base = OTHER; note = 2'-O-methyl nucleotide
  modified_base 34: mod_base = OTHER; note = 2'-O-methyl nucleotide
  modified_base 35: mod_base = OTHER; note = 2'-O-methyl nucleotide
  modified_base 36: mod_base = OTHER; note = 2'-O-methyl nucleotide
  modified_base 37: mod_base = OTHER; note = 2'-O-methyl nucleotide
  modified_base 38: mod_base = OTHER; note = 2'-O-methyl nucleotide
  modified_base 39: mod_base = OTHER; note = 2'-O-methyl nucleotide
  modified_base 40: mod_base = OTHER; note = 2'-O-methyl nucleotide
  modified_base 69: mod_base = OTHER; note = 2'-O-methyl nucleotide
  modified_base 70: mod_base = OTHER; note = 2'-O-methyl nucleotide
  modified_base 71: mod_base = OTHER; note = 2'-O-methyl nucleotide
  modified_base 72: mod_base = OTHER; note = 2'-O-methyl nucleotide
  modified_base 73: mod_base = OTHER; note = 2'-O-methyl nucleotide
  modified_base 74: mod_base = OTHER; note = 2'-O-methyl nucleotide
  modified_base 75: mod_base = OTHER; note = 2'-O-methyl nucleotide
  modified_base 76: mod_base = OTHER; note = 2'-O-methyl nucleotide
  modified_base 77: mod_base = OTHER; note = 2'-O-methyl nucleotide
  modified_base 78: mod_base = OTHER; note = 2'-O-methyl nucleotide
  modified_base 79: mod_base = OTHER; note = 2'-O-methyl nucleotide
  modified_base 80: mod_base = OTHER; note = 2'-O-methyl nucleotide
  modified_base 81: mod_base = OTHER; note = 2'-O-methyl nucleotide
  modified_base 82: mod_base = OTHER; note = 2'-O-methyl nucleotide
  modified_base 83: mod_base = OTHER; note = 2'-O-methyl nucleotide
  modified_base 84: mod_base = OTHER; note = 2'-O-methyl nucleotide
  modified_base 85: mod_base = OTHER; note = 2'-O-methyl nucleotide
  modified_base 86: mod_base = OTHER; note = 2'-O-methyl nucleotide
  modified_base 87: mod_base = OTHER; note = 2'-O-methyl nucleotide
  modified_base 88: mod_base = OTHER; note = 2'-O-methyl nucleotide
  modified_base 89: mod_base = OTHER; note = 2'-O-methyl nucleotide
  modified_base 90: mod_base = OTHER; note = 2'-O-methyl nucleotide
  modified_base 91: mod_base = OTHER; note = 2'-O-methyl nucleotide
  modified_base 92: mod_base = OTHER; note = 2'-O-methyl nucleotide
  modified_base 93: mod_base = OTHER; note = 2'-O-methyl nucleotide
  modified_base 94: mod_base = OTHER; note = 2'-O-methyl nucleotide
  modified_base 95: mod_base = OTHER; note = 2'-O-methyl nucleotide
  modified_base 96: mod_base = OTHER; note = 2'-O-methyl nucleotide
  modified_base 97: mod_base = OTHER; note = 2'-O-methyl nucleotide, phosphorothioate linkage
  modified_base 98: mod_base = OTHER; note = 2'-O-methyl nucleotide, phosphorothioate linkage
  modified_base 99: mod_base = OTHER; note = 2'-O-methyl nucleotide, phosphorothioate linkage
  modified_base 100: mod_base = OTHER; note = 2'-O-methyl nucleotide
  source 1..100: mol_type = other RNA

SEQ ID NO: 2080 - skipped

SEQ ID NO: 2081 - RNA, 100 nt, synthetic construct; identical to SEQ ID NO: 1081
  misc_feature 1..100: note = Synthetic
  modified_base 1: mod_base = OTHER; note = 2'-O-methyl nucleotide, phosphorothioate linkage
  modified_base 2: mod_base = OTHER; note = 2'-O-methyl nucleotide, phosphorothioate linkage
  modified_base 3: mod_base = OTHER; note = 2'-O-methyl nucleotide, phosphorothioate linkage
  modified_base 29: mod_base = OTHER; note = 2'-O-methyl nucleotide
  modified_base 30: mod_base = OTHER; note = 2'-O-methyl nucleotide
  modified_base 31: mod_base = OTHER; note = 2'-O-methyl nucleotide
  modified_base 32: mod_base = OTHER; note = 2'-O-methyl nucleotide
  modified_base 33: mod_base = OTHER; note = 2'-O-methyl nucleotide
  modified_base 34: mod_base = OTHER; note = 2'-O-methyl nucleotide
  modified_base 35: mod_base = OTHER; note = 2'-O-methyl nucleotide
  modified_base 36: mod_base = OTHER; note = 2'-O-methyl nucleotide
  modified_base 37: mod_base = OTHER; note = 2'-O-methyl nucleotide
  modified_base 38: mod_base = OTHER; note = 2'-O-methyl nucleotide
  modified_base 39: mod_base = OTHER; note = 2'-O-methyl nucleotide
  modified_base 40: mod_base = OTHER; note = 2'-O-methyl nucleotide
  modified_base 69: mod_base = OTHER; note = 2'-O-methyl nucleotide
  modified_base 70: mod_base = OTHER; note = 2'-O-methyl nucleotide
  modified_base 71: mod_base = OTHER; note = 2'-O-methyl nucleotide
  modified_base 72: mod_base = OTHER; note = 2'-O-methyl nucleotide
  modified_base 73: mod_base = OTHER; note = 2'-O-methyl nucleotide
  modified_base 74: mod_base = OTHER; note = 2'-O-methyl nucleotide
  modified_base 75: mod_base = OTHER; note = 2'-O-methyl nucleotide
  modified_base 76: mod_base = OTHER; note = 2'-O-methyl nucleotide
  modified_base 77: mod_base = OTHER; note = 2'-O-methyl nucleotide
  modified_base 78: mod_base = OTHER; note = 2'-O-methyl nucleotide
  modified_base 79: mod_base = OTHER; note = 2'-O-methyl nucleotide
  modified_base 80: mod_base = OTHER; note = 2'-O-methyl nucleotide
  modified_base 81: mod_base = OTHER; note = 2'-O-methyl nucleotide
  modified_base 82: mod_base = OTHER; note = 2'-O-methyl nucleotide
  modified_base 83: mod_base = OTHER; note = 2'-O-methyl nucleotide
  modified_base 84: mod_base = OTHER; note = 2'-O-methyl nucleotide
  modified_base 85: mod_base = OTHER; note = 2'-O-methyl nucleotide
  modified_base 86: mod_base = OTHER; note = 2'-O-methyl nucleotide
  modified_base 87: mod_base = OTHER; note = 2'-O-methyl nucleotide
  modified_base 88: mod_base = OTHER; note = 2'-O-methyl nucleotide
  modified_base 89: mod_base = OTHER; note = 2'-O-methyl nucleotide
  modified_base 90: mod_base = OTHER; note = 2'-O-methyl nucleotide
  modified_base 91: mod_base = OTHER; note = 2'-O-methyl nucleotide
  modified_base 92: mod_base = OTHER; note = 2'-O-methyl nucleotide
  modified_base 93: mod_base = OTHER; note = 2'-O-methyl nucleotide
  modified_base 94: mod_base = OTHER; note = 2'-O-methyl nucleotide
  modified_base 95: mod_base = OTHER; note = 2'-O-methyl nucleotide
  modified_base 96: mod_base = OTHER; note = 2'-O-methyl nucleotide
  modified_base 97: mod_base = OTHER; note = 2'-O-methyl nucleotide, phosphorothioate linkage
  modified_base 98: mod_base = OTHER; note = 2'-O-methyl nucleotide, phosphorothioate linkage
  modified_base 99: mod_base = OTHER; note = 2'-O-methyl nucleotide, phosphorothioate linkage
  modified_base 100: mod_base = OTHER; note = 2'-O-methyl nucleotide
  source 1..100: mol_type = other RNA

SEQ ID NO: 2082 - RNA, 100 nt, synthetic construct; identical to SEQ ID NO: 300
  misc_feature 1..100: note = Synthetic
  variation 1..20: note = n, if present, may repeat up to 20 times; if present, n is a, c, g, or u
  source 1..100: mol_type = other RNA
